United States Patent Application Publication US 2026/0272820 A1 - sequence listing, part 3

SEQ ID NO: 20 - DNA, 3209394 bp, Candidatus Nitrosocosmicus unguis (residues 1,604,698-3,209,394 of 3,209,394)
  source 1..3209394: mol_type = genomic DNA
catcgaccacaatgcatgggaatttttgcacatttctattcaggacaggtaaaacggtcaagtgaagcaccgaatggtaaaattcttatgataaggcgatactattgaaatgatttaacttctgggttaggcaatccagccatttacaaaagaagattcggtagaaaaaataccacatattagagactaaagttagatgttatagaataagttgaccctatgtataataaggattcatcctttgggattaagttctctgcgataacagggttgtaatacattgactagattggatcaaaaatcaataaagcaaataatcacagcacaggtggcctcgaatccattaggttatcttggggattgtaatataaaaaaatcgtataagcgatcggtaagacattgaaacaagtagtaattttcgaaaagacaagcgaatccctattttgctagacatgactatttgccgaccataatcaaatagccaaccaaattatataatttgattcaatgaatagacagcgaatatagtttgatcctcaacctgggttgggacgctaagtctttaagatggggattcctacaaaaacaaagttagtaaaaaaatttattgttctgatggagagacttaactttattactttatcttgaagtatttttatataaattccaaatttttctaagtggaaatataaccgaactcctagagagggatcgacggttacgtaatgacattcaaaaatataagaaattaataaaagcataagcaaaatcatattttcattgcttattgaaattacaaaatattattttcttaattccttctttaatatatgtgagtgattcgataatcattattattcgacaattgttttaacaatacaaaaatattcaaataagtgagaaaaacaaaaaatatattcattgtatcaagcaaacacaattcttaaaagaaatataatttatataaatgattcaaaaaattatctttgatgtgataatttttattaaatattaagatcagatatagattttctctaaataataataaaacctttatactacaatcttgatattgtgtttatgtgcataaaatgtgaattattgaatattatttgtaaagaggctgaattaaaaaggcaaaagatgcttttatccaaggaaaattatctgaagacagggcttcttagtgattctagaataatgatgcaagaatctgaagaaagagatactgagtaccttgtttctgtctgaatacatatgtctgtgagattcacttgaaataacccaaattgataaactagacacagatttcgttaattttaaaatattttgtcactttcttaatcgagatatttaattgaatgtcattagtacatatactattgtattgataacaatattcaaaaattagatcggacgttgtttgggattcaaagccttattataaaaatagggagtctatttctatatgcaaatgcaaatatcaaatataggacgacaactgaatctgatgtatatatcagaaattcggggaaataaaaacgcaattgctaaccatccttcctgcaaatagtaatgtaattcaaaggttcaggcccttgggggtttgagtttgataggtaaagcgggttcaattaaattttttagtgaatattactttattaacgttttttgaaattatatccttataacagtaatgggctcaagggcttgataccgataagggttcattaaagtatattctaaaatgaaataagagtacggaattataaagattatgtcatagttcaaatgattctattaacttaaggtgatttttctattgctcaccaatattgcaacctcggttggtagattcttattagaacttcgtttgatatatcatactcaaattgcaagaaattttgtcaaaggaaataggtgatttaacatgggttcgaattgtatttcagtcaaatttctaaattaatatcatttttattattttgtaagaatacgagaagtttagatcaacttctcttacaacttccacctccaccagaaagttcaatagtatttttttacacagtaccgcaaaatctttgtaatcctaatcgctagtacaaacacacgttttttcatcacactttataccctcgccgcttgtgttggagatcgttttttaaaatcttgatttgatcaaagaagcaaggataaactattatcataagataaatcgcgtaagaataaaactaaaataggatgattatttgccattgatgaaattgtttgttttccatttttattacaactgatatctcctacagcagcaacattaaatgaattatcttgccttgcaaaagcattattcataatcgataaggatagaaggaaaataagagaaaatccaattgtcattaggcgcatcatattacaaatcctcacaaaaattctttattttttacacatttataacttaagagagtttgtagattcgatttcgaatttcctattttagttttattctgatcattctttatctgatgaatattgtccttttaagtcgactaagtgcagtcttaatgaacatccatcaataaatattgaaaatacctttaaatgagcatactcgattcaaaaaaaattcatagtgtaaaatgcttatatagtttcttaataatttttttatatcaatgcaggaattaatattattatccgttctcataattagtggtgctattttaggaactactatgataatgacgccattcgcccttgtccaagcaacaacaaatcaatcggttaccgttcaatgtattacagcaccttgtgatttcccttctagccaggcaacaacaaatcaatcgggtaccgttcaatgtattacagcaccttgtgatttcccttctagccaggcaacaacaaatcaatcgggtaccgttcaatgtattacagcaccttgtgatttcccttctagccaggcaacaacaaatcaatcgggtaccgttcaatgtattacagcaccttgtgatttcccttctagccaggcaacaacaaatcaatcgggtaccgttcaatgtattacagcaccttgtgactatcattctcctccaccattatcgtcgtcaccaaaattaaatggtaacaacgataccgtaacagcacctaaaagcgggatagaaacatccggtgaaggtcaagatagcagtgataaaaaggaaccatgtctttctccgtgtccaccaggaacagagatgtgtatccaaatgtgcaaaccaacgggtcaacaagatatagtaaacgaagaaccacaaagtgattcacaacaagaaactaatttctcgccacaggcagacgaagatttatctgacacaacagcaggggaatccactacaaatgatgaaggcacatccgaatctgagtccggtggtagtgagtctgaaatgtcgtcgcattgacagcataataagaaaaaaagtataaaggtagagcaggatacgagaacaagtactctgtggctaaacacctttacatggatgatggagaggtattgggtaacgatactttgactctttcaattgtcggaacgttatgtggtccactatattgaagtataagcccattttattaagttctcatcttcataggataatattgcaggatttaggaataaggagattaacaatgaaaatttctagttttcacttgagttataatatgaacaagattggattgaattctactctctcgagttcaactagagtaattcatcctcgataccgagcaaaggtcagtcctgtcctgactttcagcattctaaagcctttgtcaatataaaatgtgaatttaagaatatgaccttgcgatattcgtaaaaataataaattgtaatttaaaaaatgggaattttgagagcgattaaagatttagtctttaccagtacaatcactttccccttctacgatgaacttagtgaggacatgtctgtccctctgaaaatatccaatatcaatcaaaaataattcttatatgagccagtacttgatacaacttagaacaagcaagatgcgattagaattaacaggtgttcttgaatgggttaaaaaatacgatgtattatgagtaatatttataagatagttcacttataatactttatatggtaacactattctaagaaaatatagataagacatgaaaactgcactaagccatacacaggttaatgagcaattttctactttgttcaaatttgttttaagaattatggtaacagtatttaagatgtatatcagtttcaaatattttaaaaaagactttaaattaaaatatttgatttagggctgttatactaatcgacttatttagaatttatcgatttctttctattatatgctatacacactaactgtattatttcagttgcggtgcgggaagcgaaaaaagacagataaaacagaacacctttcttatcccccaccactattgtgtttacgctcttcttcattatggtattgtttgttcctcagttccatgatactaattttgtatttgccaagcaaggccattttgtaaatgtccatagaccggtgaatctttgtgataatacactagatacaattaaaattctaagtcagttttggcaatacttgtgtaaataattgactaaatatgatatcgccttccaacgcatgaatccatgattctcggttatgtcaatgatacgatatttctgtctagacctgtagatccaatcagtgcgataatctaataatattttgaaaattgaagaacaaggattcaactactcctcctccgctaaggctaatacctatcatagatgctaagatggttgaattatcattattttttccaggttttcaaaattgttagtatacagcattttgctattctggtaagggattataattatccacttcataagttacaaattctttcatattcatgtttaggaaaatattacttccaacctcatatgtttttgattttggaatatcatacctttgtacgtaattcccaaatacaacgatcttatcctttgtttccttcatgataaagcctacaatctcttcatttaatattttaactcctttgctaaacaatgaatcaggatacttgctcgtgaagctatgttcactgtttgtggtgagatatcgtgcatcaattttatcatcaatatatgacaaactatttctatatgctagatatttcctcgatattttttttattattagattttttaacatatttctgcctgttgttttaatctcagaaaaaggaatattatttcgcccattttgttcttcaaatacgaccaaattgtcaattgtctctttatttgtataacctatatatggagaatttaaactcatcccacctcgattaaatatttaacaattgtcataattacatatacccattgaatctattaagggtatcaatcaatatctcgttattaatgtattctaatcactattataacataaattttgaatgattccttcgatagaaactattaaattgacattaaacactattgatcaagaattagaacaagtaatttaggatttctaataaaaagaatctggtatcttagtttattcaaatttaattagaaacatacattaataactggttgtcaatcgtcgaatcaattaatattctatctgctggtatatgcttattgctttctttttttctcaattggtcgatttctttgggaaagtcaatttagtaggttgtctaatgggtttagcaatgaacatatcgttttccaaaaccaactagaaatcaatattcgttaattaaggcctatcaatgaataaaaattctaacaaaccgttgactgatctaccaattaatagaattaagacgtaagaagtagtcattattcacaatttactatttgtaggtattgggtcttggtattgagatgtgttatgctatctcaagacctttattggtttacaccaaatcctacaaccttttacaaaaggcatacaatattaggctaaataaatttgaatcatttcctgattaggaattttaccttaatttttttgattaataagtattttcattcgtaatgaagacaaattagagacaccctgtaataaggtcaaatggtctataccacatcaaaacaaaaaaagttactaaactctttcaatattacttattaatgaatgatagagtatatgaaaagaaaaagcagactattctaagatttatcaaaaaacacagaaaagtagattactcatttattctaaatgaagttaacattgattatgacactttaatgaagatactttcggaattacgtaaagaaggacgtttggattagaaatcgagtaactatgttttaaactttgattttagtacaatcatatcttaaataatacattaatagggttttgagaagatagatgtcataatgacataattaagacaatcttctgtctcgaattagttaaatttatgtagttaaactatggaataagtatttcatcaaaacacatctggagatagagcgaaaatttagtttgggtgcattgggatttgagttaggtaggtaaaggggttcaatagatgaaaaaatctatcttatatatactaaaaaaacaaaaaccttatttgagcttttgacattattcgcatactaaacctagaatattctattgggatattaaaattggatgaaaataaatacctgaattttagctaaatgtcaattcaataatgtagactaattaatatattgaattaattccaaatcgtagagaaaaatctcagattttattatgtgttaacaataaaaagtggttgttcatataatgactatcattatattagtttgtattcaattgagcacttagcattttctgtttgtatttattttttcgctcggtgtgaatattctcttgcagtccccatcgctacatactgccgcaccctgttgttttgaacctttgtaagggcaaaaactagcattacccgaagcatcttgggatatttgtgtgacaagagacataaagccagcaagtattgttataattacgattgtggcaatgagtttggtttcctttaaaaatttcacaataacatcatattaaaatattttgaattttaaataatgaatttaacaaaataataaataatttgaattaaaagtgaaaattttaataaaaaaattccttgaatatttgattgtttttcacaagggcacaacggtagacatgtctataccggttcttgaaaatgggtttatcatattaaataattaggtaaatattgagattatttggaatggaatgatctgaaaaagatttgtagaaatatattatcattaaggcttatctagcctattactatactggtcattgttcagcaataagaatgatttttggataaaaaatgtaatggcaataattctatatagcattatgatttagcagtaagattttaccaacaccttattgatttctaatagaaactatgatcatgcctggaactcttgataaatatattaaaatattacccgacggctcacacaaatctatacatagaattatagtaaagagagattaaaattttacttgggtattaactggcattgctgttattaataatgaaacaaaagagttaattgcttttgtagatttaagatgggaaacagagacttataatagataactttctaacgttttaccttttattcttctaaatcttcggtttgattccaaaagtaaattaatttagcacaatcagggtctgaactgttactactatccaattctagtggaactcctagagccattttagatactttagtaagctgactctcgcatcgagaaaacaaaaaagtccacaaatagcacaaacttattggttcatggattaagccaactcaccagagccagaaacttctgtgaaattgttatatatatcacgtgtaataatacaacataagacatgttctcaatagtttttgcaggattaatttttacgcttattatcctaacttcatcaaaaggagtggaccatgtctttggagacagtgtaatttcgaccatttcggtagaaaaattccctcaagcaatagtatttaatccagctaacaacaacatttacgtagctaatcgtgattcaggaacagtttcaattattgaaagtactaataatactgtaatcaacaatattgaagtgggcatgtcaccacaagcaatagtatttaatccatctaacgaaaatatctatgtagcaaatacgatttctaactctatttcaataattgacagcaatactaatgcagttataaaggaagttgatgttggtcgtgatcctgttgcattggaatttaatccatctaacgaaaatatctatgtagcaaatacgatttctaactctatttcaataattgacagcaatactaatgcagttataaaggaagttgatgttggtcgtgatcctgttgcattggaatttaatccatctaacgaaaatatctatgtagcaaattacggttccggaactgtttcagtaattggaggatcaaatcaaacgttactgggcaatacggtggttggtaccgaacctgttgcattggaatttaatccagctaacaacaacatttacgtagctaatcgtgattcaggaacagtttcaattattgaaagtactaataatactgtaatcaacaatattgaagtgggcatgtcaccacaagcaatagtatttaatccatctaacgaaaatatctatgtagcaaattacggttccggaactgtttcagtaattggaggatcaaatcaaacgttactgggcaatacggtggttggtaccgaacctgttgcattggaatttaatccagctaacaacaacatttacgtagctaacctggtatcaaattctgtatctattatagacagtattaataatgatgtatcagaaacactaaatgtcaataatgtgcccttagcactgacgtataatccttcaaacaatggtacttatgtaacgggtacgctcactggtacggaaggcctagtgaccgtaattcactaatttgtatgcatttgagaatgcacttttagaattatgtatttacgattcaagatcgtattgaaatctcatccaattttttcctttattcagagctaataaactaaaaaacttaattgtgcttatatggcttcgttgatttaacgatagatctatagtttgaagatactctatttcaatcatgattggtaaaaaaacagaacatcttcattgtacctagaatctagtttatacttgtacattcttattttgtcaaccagaggtttccaaagtagtgttctttttgaacaaggtcaaaagaagccatgtcttcttagctaaaaaatggaattggattctgtaaacagaattcttgaaataaatttatatccaatcacctcgaaatgtttctgctcacaagaatcgaaattatagggctcaaaactatgaaatttgaagagtttgcgattttagccaaagaaaattatatgtctttccgatgttccattttcctttatgaattcatggaattccataataatatgagaattatccctatttgaaagcaaccttatcttgtaaactgtggtattgagtttggttggcacttttccatacctccagatagttttgataatttctcattctgcctgtctttaaccgattaaagttaagacattcaagtatatgagcccatgtagttaatgggcccaaggggttaagtaatagatatattatgagtccaaaacctcgtcttaatattatttgatacccaaatccagataaactctgagtcaacctttaacaatgtttcatctacaatgtattctgatatctttttcatcttttcgatggtatcctttgaggactaaacttctgaatccatttccggattgcaacgactttttttgactatatgtagattcgacaatgccttgacaacgttccttaatgattagcctagaaaatacaaatacagaccatagccaatgtactgtgaggcggttctctttcttctgattaacatataagaaatagtgcttcttcaagctatatcattttcttaagttaacaggtccgaattaacatagtaaataattttatatctaattattatagaaatctgtttatatatttttatgaataccaaaatttgatgaataaagtcatcaatgtaaataaagcattagttacatcaacagtcctagcagtatcattcattctattagtaggtcctatttcaataaccattaatgttgctcaaggtaatactgccaatagtacacaatcgcagaacaatacaggaaatgacgcagcagcaaaaagcggtggtggaaaccaggctagtctaagtgtaacggataatggtcctaggcttcctgatatcaaaactggtgaaaattcaggtaatacaccttaaataggtaacaacataaacgttcaaagcctatataacgaatgaaatagcgcgataggaattggatttgggttttgcttattctattataacggttttgatgaggataaggtcctgttggaattcagattcttcaaagttcataaccatttcattcaccttagactacaaagatataatcaacgtagcttaaatatactgtatagattatttaatctcgaattttttagtatttactaatagcaaaaaacctcctggtggaaataaaataaaatatactaaacttaatactggttaagttaagttgtacttaacctctcaatattccatattatttttttgatatgtctcaatatacaagaatttcgacaaataccaatttacaataatgggattggaaaattaataaatttgctaatattagctgcaccctgcataattaattcatctagagggtatttgttgtcatatttataatatgtttaacaaattatatcatgagctcagatattgattggacggatgtcatcaaaaaggaagcaagaggtaataacgattttgacttgggagaggttcaagaggtttctaacggtttaatcttgactcagagaggtgtaggaaacaaggaaatttttagcatcacacaatccaaagtagaaagctacgatggcaaagtcttaagatttgctgtttcagaggatgaagccattaacaagttcatgaaaagatttgaggcggatccctctaaagaaaaaatgacaaaggaagaaatcgactgggatgatgtcatcaaaaaggaagcaagaggtaataacgattttgacttgggagaggttcaagaggtttctaacggtttaatcttgactcagagaggtgtaggaaacaaggaaatttttagcatcacacaatccaaagtagaaagctacgatggcaaagtcttaagatttgctgtttcagaggatgaagccattaacaagttcatgaaaagatttgaggcggattcaaaaagataatgaaattgaccaaatgtagatactatcttaaagcactcatgacttctctctatttattttgatttcctaagaattcttaacatgaaagatgtttataacttttgtaaaaataacattttaccatctgaatcatcttgaacttctgagttagatgaccctgttaatggacactaatgatggtgcaaaaacatatcatctaaataacacagatgtgctgcctcgtgtaattagagatggatagtcacactatttgtgttggcttcactcctcaatcaatactcacctcggaatttattcctgttaatgctattctaaccgatttatcaatagatgaaaaagacaatgtttggttaacttttggtacttatcctgatattattgaacctggggagaatctaacaaaaacaattaatgtggtcgtaatgggtaaagagggaagattataatcaaagaatctttcaaatctcgtcaatcaatacctcaattcccagtctgggctgacatatatcaaacacttggttaacttgtccggatggtgagaatgtgaggatcctatctctatctttatctttggctttataagtttcatcttggcaataaattgtccattctgcttttaaacttcaattcaaagtcaaatcaaaacaaacggacagataggacctcgaacccattagttaaatgggaactgttccgatatagataaatgccgctaaatttggttatttcggggtttcataatagttatattacaagtcgattttggatcgtttttcgctaaagcaatctccaggaatgttattgtttaataaacgtgttataagcacaaaaatctgtcctgatatatggattaattggcaaagataagagtagactaaccattttttttaagcatactaggatcattcaactatttgtattaatttcatagtaagaactcttttatgcttaagacggctatatactgttagcagtgagttaatattgactgcttcaatgattaaacgctgttagaagaatcaaagtgtgtctctatacacaaaactatccataattgcccaaatatattctatgtatggtaaaatatccttataaagactaaatgaagaataatgtgctgatttggctttttcaaattattaatgttatttgttaagttaataaaataaacatacagatccaaaaatataatgccgggtgtgggactcaaatccaaaccgggtaatcgtggagtcatcaaatatatcttttaactaattaaagggatggggtttgaacaccgaagcaatgcttgaggaatcaaatttaaaatgatagtgcaagactctgattggattttaacattttttcagttatcgtaagactacgacttatttaatctatcacgtatactataattacggtgataattagaaaaaattttgataatgagacgtgtgtctccatcaaaacatcaaataagattttcatattgtattttattttagttctagcaactggatcactactttatcatcaattacctattgcattatcacagtccgttaacgatccaagtttaaatgttgaatcattagttgagggtctaaattctcctaccagtatggcctttttaaatagtaacaatataatggttttagaaaaagatggacaagtaaggttagtttcaaatggccaattgcaatctcaacccgtcttagaaatccctgtagatacccaaagcgaaagaggtttacttggtattgcagtagagaagaatatgagcattggtggcgactccgatcccgatgataacggaagggatatttttctttattatactgaatctgcaggagatgaaggtgaaggcgaattaaaaaatagagtatacaaatacacctggaatggccagacattagaaaatccaactctcatcttagatctcccagcaatacccggtcccaatcatgatggtggaaaattgacaattggacctgataattatctttatggagttataggagatctgaatcatgatggtatgctacaaaactttcctgatggcccgcctcctgatgatactggtgtgttattcagaataaatcctattgacggaacaccagcaccagataatccattttccaaggaccctgctgatccactaagtaaatattttgcatatggtgttagaaattcctttggaattgcattcgatcctgtcactaatgttctatggaatacggaaaatggacccgcttcaaatgacgaaatcaatgtagttgaaccgggattcaacagcggttggcaaacaattatgggtcctatttcatcttctggtaatactgaagaggatttagttaactttgagggttctcattatagagatcctgttctaacttggctagctccaccagccctcactgacatagaaattctaaactctactaatttgggtgaatcctattccaataatgtatttgtgggtgataacaataacggaaacttgtattattttaagatgaatcctgaaagaaatggatttttacttgacactgttccagacttagttatagacaatgaagaagaacaatcttcagttgtctttggaagtggttttggaagtataacagatttagtaacaggacctgacgatggattattgtatatcttatcacatgataatggaattatctatagggttacaccggcataagatttctattttttattcttcaaatattgaggaatattgtgatttctctttgccttttatcttacacatacaccattacaactcactataaatcaaactttaaagattaatttagagagaaataaaagtttaatttttatccttgaatttaagaatcaagtaatccgtttattagaacaactgctataaactaacttttgtaaattgaaatgtttcatattctacaaatgaatggaactgtataggctaaataaaatttggaaccatcattgctaataatttcattattaaatgatagattaggctgggtgtccataaaaacaaaatacattgcagtaattatcaataaatcaagttaaaattcagcaaaatattagagatcgataaataagttgaataatcatccttaaggtaatcattatagtatgaaaaataggatcaattccataataattccaatgaattcatctttaatttggaaaaacagtacaatattgtgaagaaatagttagttaaacaatgttttttcaatatattatgatagaatatatataaataatttcttgtctatctatatatgatgaaccacaacggtctcatcaataatttttatagtaaatatagagatataatccactttaacaagaattttctgattgcgagtatcgtaactgctcttttagatgttgcaattgtaacttatgcctcaataacttatgcaggtaataatcttttaatttcgattatatctttgactgctgattttgcgatatttaatctcatttttattattttgttttatgttgagaacaagcaaagatatttaaaatctgatggaacaaaagataaacaacaattaaggcaagattctataaagttagtaactactctgggtttatctgaaatagtatatttatttacaaagtttgtatctacatacctctttttcgagtttactcaaattaactcctcagagatatcaataataactacagtaataggttggatattatatgccacaactgctaatattatgataaagaaaacaaaattttttaaataaacaattatctttttccgatgtttggaaatacgatattagagaagtatgtcaaacctcatcaattaaaaaagatccctgttaaaggtccttttggctattagtaatcgagacaattcaaatacttgataacccgggttgtgtataagaaatgattctatttaacaatacaaaataataattatgctatagaggtattccatctttagttttttctatcacttgattgtcgtacttaacttcttcttttgttatttcttctgctattgttttagtttcagttattggttttttgtttattactagttcctctctaacaaatgatttttttgtaattaatggttcttcttttttgattggaattaaaaattcagtctttgcaaacattgagacgtcgttatccgattcctggtaaggttctaggttagaggtcttactattatttaaattaatatttgctactttgttaagcctatcgtcatttatgctgacatctcttctttgaattgttactttttcatgcatcaactcaattttcacagttttcgtttcctttatgggttcttttacaattcttatattatcttcaataatggtcttggttacatttaggttttcactgatcaaaggaattaacatttctttttttgctggcatatcctgtgatccggagagagaatcatcattaaaggcaccttctccaattttttgttcataagttgaaaggtctgattcatttagcgagaagtttaggaaaactccattaaagtattttacagaactctttggtaggtggtatattttcttcttaaacatacctacttcggtaacgatatagtcacctgatatatctttaatcgtaccaaaatctaagccattctccccgagtgcttcttttcctacaacttcattccaattaacttcattgtcattttcagacgacatattgaatgtatttatttaacaaattatatatggttgataaaattctttcgcgtatctatattcttgtgttttataaccatctagatactttgaaatatagttttctgacaaatacggacaattatttgtcttcactttttttatgtttaaaatattagattgtatttcattagaagacgttatatcattttagtctaatctaattaagcaagaattttgcagattcagcctgaatattatgcccaatgcataggaaatcgacattgtgataataattaaatttattgtgattttaaattaatatctataatgacaatacttctaacaatcaagaaaggtacatggagcaaatagacaaaaaactattctaaaatgagaattaaaatagtatttgagaaataaggaaattgaagaagactatggtattatatcaatgaaatatgcaataatgtaagaaaaaccataatatcttttgcagtatgaaataacgacctaattaaaaaatactgatcaattatgccatgtaaagatgttctaaaatatatcggactacaatgcctatattctaccattagacttatcaaactacgatttaaatgcagtagcatccagttgttggctaatttgatgtattcctctcttttactcttgtaggttcgatattactagatttcatatgttcatgaattagttcttctgttattgtctttgtttcaaacaaagtttgtttctttactattacttcttccttgacatgggatcttttaactataatgggttcttctctttcgagtgtcataattatttcagttttgtcatcatagttcctcaagccctctccttcttctttctttttgtctttctggctatctgaagaattactttctaatttatgactgtgggattcgattttttttgcattattattttctttaaatggtcttttagttattgtaactttatcgtgtattaggtcgatctccacaattttcgtttcctttatgggttcttttgttatttccatgttttcttcgatagtctttttagttacttctaatttctcgtctattaatggaatagttgtctgtacttcatgtgacatgtctgaagatttaaaagaagaatatccttcgaataaattatcctcagtttgttcataactttttaaatcagtctcattaatcttcaaattcaaaaattccccgtcaaaactttctatcgatgaaattgggagatgatattttttcttatctattaaacctctttgggtgacaatataagtctcccctatctctattacttttcctaaatcaagcccatcaattcctatgacttctttctttatgatatcgtcaagattaatattcttagattttaataattcatccttagtagtcacaaatttttttatataacatattatatattcatgttctaaatattaggtaatttcttgcttcttcccatcaggatatttgacagtaattttttcctttctgacttctacatctactttgcgcttttcggatattcgagattttttaataactatttcgccgagctttaccatttttttatctattattatttgttctccccaaataggaataacttgttcttcttgagagtcattattgttattaacagaaacttgaatctcgttattatttatattggcttcagaattgggtagtggtggccttttttcactctgaccagattctaactcggtctggctcatttttgcttttattgtttcctcgtttttgggcatctttatgtccaaatcatttggataattgcgatcatccctattctctgtcttattgggttgatcctcatctccttcagtttggctaggatgaaacacttctgaaattttttcctttacctttgaaaaaatctcaattaattcattattgctgtaggagtcaaattcttttccattgataaacatctcctcataattgatgggtacttcaatcttttttgttgattttatccaccttttttctaaatataattgtgtctttgtagtctctttagtaatttcaaattcttcttcatagattggaatcttttctacaattagttctttctgttgggatatagtgtctagggaaggaggactatcattaacaggtgtaattttattgtcatgcgggactacagactcgttattcacagatactttatattattaatatttataatggtatacaatacttgtgggtattttctgttgatttttgtacttgtttttcttgaatacactaaagcaacacttgtttaatccttaataaaagtaagatagtgtatttactaattaccatatttagtggttagtaggtgaagtatcatattaaataccttgtattaatttttgatgagaatttaaagttagtttatgacaaagggtatttcaatattctccagcataatagtgacgaatccatatttatcaacacatcgtgatgctcaatatatattaatgagaatctatattatttccaaaaaaaacatacccatccatcttttatatatcgcatcttgtttttatcatatttattaactgtgatatacacctaaattattgatcaaaattaaagaagaaaataccgatcaaataaaaaagggaataggtaagattgagatcaggctagaaaataatgaggtagcgacatttgagagatatccggttttcgttaactccaaagatatgaaatacatacaatatgaggtacaaaagaagcaaaatgatcttaaaaattacggtaatgagaaacatggaatattggaacaggctaaacaaaaagctttagaagttaaagatactgttgtagataccgcgaaagagttttcaaatgaacaaaagaatcaataataaatttaagtattaattgttcttaattatgcattaataactagaagtaatatattgttgatggttaaataacatattaaacaattcgaaacatctactgtgacagcatatttcagatcatcactttcatttcgtataacactaatttgcccattattattcaaccctgttatttctatctaatctatatttcgtattttagtcaattgcataaaagatataccttttatcctatgattaccttcatcataacaagtatatccttcttccatcattgaccgcattcttaacttccaattcattttattactaaaaggaggatatctgttattaaattagatttgtaatatggttagccagttaagttattggatgggagtttgataagatctatttaaagtatagaatctaaattgtactaatgaaaaacacctttatcatcctggtatgcacagccacattattttttacattggcatacacaggatcagtgtacgctcaaaatcaaaatcaaacaactgcatcttctcaaaatgagacaatggcaactattacagacaagccacaaactaccatagcaaatcagactaccataccagttgaacaaaccacagttactgtcaatcaaacaacaaagcctatggataaatctcaaattcaaccactcggaaaccaaacattgacacagcaacctggaaatttatcaaatcttgaaaataaaactctaattcaacccacaggacctgctattaccactatcgccaataaaaccacaataccttttaaccaaactacagttggaatgggcaatatgactaattaataatctattccctctttctttacattaagaaatagaaaattagagtaagcatacaagattctagaatagatcttgattcataattttatttaataatttgtagaattatgcagaggacaaaataaagcttcggaccatagttttcttaaattgactaaatattcgtattgaccatactgcgaatatcattcagaataccgataactcctttcctgaaaaaaaagtagtagatattactgctgcaacgaatttccaggaaacaaaggaactgattttacaaggctgagaatactaaacatcatgtcctgcaataatctctaatatcccttatttcatattgataaaaaggaaaatttaatgtggataaattcaataagatgaaaaaattatgacagaaaaattccaacctatctccaattattatttttattcttcactttagtttttgaagatgaagatacttaatgaattgagttaagaaaagtgtaaaatatttgaatttattatgcttaactactttgagcgaatattatcaatatgtcagaatctaataacgacataaattatactgatccgaccaaaacgggagagttttctacacatttaagacagggtgataaaacaaatactccggctgataacgaagccacagatagagaaatcctatccaaaatggctaatttgttagagggacttcaatttccagctacgacggaggaaataaaaaatcatttgaatcataaatcaccggcgatgggaaatagaatcaacgatgtcttggaggccatacaaaataatttgaatccaaaaacaaaatatcatgacgtatatgatatagctctagctgcaggattggtgataaagaaaaattagtttctaataaaatattaaaatagaatctatcatacatcgagttctgaatatctcgttgcaatatgtttggtcaaaacaattttagtaaatttagtttacatcgaattagatttcttggatttaaaaagaaaagcaaaataaaaaactaaaaaatagttcttcaataacgcatcaagccagtcaaggattctttgatgtgttatcgcaacagcacctacttgaaagtgtttttctgattcttcctctgtaaacattatatatttcgttaattcagattgtacagaaaatgatcaatcgtagacttttttggttgcccttttttatctttattatttattgtcgttccgcaccatcctttaagaacggcgctaaattatagctacatgaaaataaggcccgtcaaaaagatctattagattcgattttacattttttttatactacgtatctaaaggctgattcagtaaagcctactttcgtctttatagagtaatcattgattgcttccatctagataatacctttcaacaatttgatattagcagattcaaatttacatgttaacatcagttagtggaaataccaaagtagaacgaactaaatttacaatgggaatatagatagactgactattgtctccaatggcatttgtaaatttgtaatttgatgtcattttatttaattcaataaactttgtagaaggtttttcttccaagataaaatagtgagcaacgactcctccaaccatccctgtgtggacaaataagatttctttatctttatatttaatagaataaagcatcggtgttatagccataaaagactgcgacgtgtaaagtactacatttagtaaatcccttagattttcatactggaggtaagtagtaaaccattcgccttgagacacacttcaattaaaatgtgttatatttcttaaatatttcttaaatatctatttggtttgaattgaccatattttcattgatataattaaaggtcccattagttgtgatagtagttacaacgactctaataattactctgtccatagagcttatctaccatatttcatttttataagaaatggcaacaaaataataagtttggatagtccattattaatcgtaaacaaatatttgttaaaatttcgacattaaaactaacatacggatacagatcttatatagttggtgacatttttagttaccatgtgattctgaataaggatcatagtactcgccgccttaaggcggtgcaactatcttccacagcccacactagatgaaaaacgatgaatggcagtagtttattattcgagtccgttgccatatgagagtagtagcgttctatcgactttaatcagttgttagttgaataactgtgtcgcctgtttattggtaaactaaatgagaaggttgccccttttccattcttgttattttgagcccagattcggcccccatgtgcttcaataatgtttttggctatgaaaagccctaaacccgtaccttgttctgatgtggtcacaaacttgttgaatagtcgtggtaacacctcttcgtcaataccttttcctttatctttaatggatactattactaattcaccgtctttttccttcctgcattccctttctccaatttgagagtcttcgtgattgatatggttcattttattcccattattttgaaactttatggctgaaatagtgatggattcgccatttgaaaatttgattgcgttatttattaggtttgagagaacttcaaaaatccttattttatctgcaaatacagtaataggctcctcttgtgaatcaaaaactatgtcaatgggagtaggcaagttcgtatgaagcgaactaatgtttattttagtatggacgtctttaattacattctgtatattttcgtttagattaaagaattctttatgtaaatctaatctattactttcgattcgcgatgtatctaaaacatcatttaccaatttctcaagtctctgtgaatttctgtggatggatatgagcctatttgcaaattgttctagcctaggcttatctttgattaaactttcaaattctttattgatattatttttgccttctaaggaattctgcagaagtgacggtatatccatttcaattaattcaaaatttccagataaggcctggactggtgtccttagttcatgacctgtaatatccatgaattctttttgctttaatacaagttgttttatctgttcgttagccacaacaagatctttattgacttttgcaagttgtttattggttaatgagaatttttcattggtttctgtcaaattatcattggcaacaagaagatttctttctgtttcagttagatccttttttgtatttcttacttcttctgatttctttctaatttcattgtttaaaagatgaagagactcatttatctctctcaattcatccgtctttgcgagtaattcacccgtttttattgtgaggagctccttcactgtcaaatcattattgcttttagtttcaggtagcgttatgtttattccatatatgttgcaaaagatactttaaataaataactaatataggccagataatcatatcgcattatccgagtaccatgctaatcccaaagcgaatagaagccttttttattatttgaaaattgtcaacagaaagataaaaaatcctatcaatgtctccgtcctttggcctaatacaggaatagatttttgaaaaaattcctatatcaatatcctatgagatatgactttattttttgagaaaagataaaaagttggcactatttcgttattttagcactagtgagataagatttactatcggtaaatactttattatacaactttttcatctaatggttcgttatcttaaggaaaaattaaatcactctaaaattgtatcggtaaaaatagaaattattaagggatgtattattgcatttgttttggctattacattaagcagtatggaaatgttatatccgaataacatccaggcacaagttacaatgtataagtgtacacctgatatgggtataaatgtgtcaatggtaaattgtcttacaaattccacatccgatacttataataattcaatggttgctgaaatgaggcaaaaccaaaccggtcaagttgctcaagatacaatgaatgggactagacaaacagcaactcaaggaatggaagttgcaatgaatgaaactggcgaagcagtatcaaatgctactggtggtgtgatggaaggaattaaggacttggttaatggcttaagctaataatagaaatctaacaatggaataaccaatataactatcacatttttattgcgaaatttcaaacaccataataatcaatcagtcttaaagttacgtttaagactgtattcaaaattttttatttgtgattacggatagtagtttttataagtcaattaaaatacaagagcgtccgtatggcttccatttcacatacttggattttcatatgaggttgcttattgttaaagacttatccttattacgaattagcagtttacgaaattctgaattagaatattatattaacaatttaaattaagcaaattttaaagtttatctgtaaaaatctcatttagaatatacgagtgaggaaaacaaacccgagtgattcattggaaaatgacaagttaaataacgaaatcctaaaacctataacaaaatctgattctaaggtagttgatgatttgaaggagttagaagtggagaattctggagggggcagggatggtggagagaggttgaaataatcttttttataatctgaattatccataactcaaatcagaatgttcaaagtggattctcgattactaactagagtgaaatttcccatacttaccacctgtttgttatgtcatgatattcagaaaatgcaaataacatggaaaataaagtaaaaactgttattattaatttccggctgatctgtatatgttaagtagtgatttagattatgtagacattagtttgaatcaatcacttgttaatttcataagtccttcctttggtaatatgtttgaatattaattaagaaggttttttttgtcttaaattctaattttattatgcttagtttgctcagattgtgcttttggctttggtatattgcaatagcactaggtgataaaattgataagattgatttctttgaacctgatttttacttatttaattctttcgtgctaattttatagaccatattgataaataaaaccaattatatcgaagcacgtcgcattattagaaaagttatttactcagagcgtcttggtatccatcccgtattaatctgtctatggtttcagatgtaaagtcagtaagttttcctgaaacactatttttgtcatctttccgttgtatgtgggttatttttactattctaaaagtactctttagtatatcgatatttttcttaatttcctcggtcataaatcgtctttgggcatattcttctaatatcatgttaatcttctcccttagtaattcatcattctctccaaggccaatcaacttttcaattaaattaacgtagtctgcatagaggccatatgtttctgaatcatatgctttaccaagttttatatcaataattctacctttaactccatcaaaatcttgtggaaccttgtttccaacagaattactactattttgcttgggatccaacaaatttacaatatatatttccaaatctggaattctctgaacctgttgttgctcttgtgattttctgctgtaattatccatacctgtactcttcactcttactcgaaatgagttttcaagatctttagaacctattcttttttcccaaaatcttttatgtgcatttaccaactctttaattggagtattacttaagagtcctccatcccagaactttcttccgtctatatcctcataagcataggtttcaggtaagcatgaacttgctattagatgtttgatgccaataccttcatcgtaatgaatgataatggacttccctaaatgagaatcaccatattctgattctctttttccttgctcactctcatagctatcaaatgtaactgtggtaccttcggccgcgtcaacactcacaacaagtaatcttggttcgcctttatcaaagctagttgcaataggaaatttagcaaatttttctatactctctcttaatggttggttatcatatacaagccattgattttgagaatcacaaaatttattatcttgttttggaggatgtacgggcttgaatacgttttccacacccgatttagtaaattcttttgcggaataatatcttcgtgcagattcttctgatgctactaagggatttccttttgcatattcttttttccactgttttaacggctcagctatgtttggtgtaggggtagacaaatacttccaaaatgtctcaagcttttctgaagcaccatcccatgtcttattttcaacaaaataactaacaaggatggcaccattgatggcacctatagaggttcctgcaataatgtcaaataatggaacatctttttcattactaacatcttgaattcctttgattttttcatggagacatttaaaagccccagcctggtatgcgcctaatgctccacctccttgcaaaactaatgctctttgaacttgcggaatagaatgtttgtttaagtttgacattaataatctatacctagtttcagatttttagtggggcttcccaaattatcagatctctccttaccttcatcagttgtggagaagtatctatctatattatcttcttctttgtaatcatctaatttgaaagcagaattgtttatagattttttctttcttatagggttaacatattttgacataagttgaatctcttctttgaatccggtatagttccaatagtatttgttaacaagagtcgagataacaaaccaaataatactattgactatgatagtgattaaaaagctataattataagccataatcgtcccagttattgtgcctcctacaagataaggcatttgacgctttaatactgattttaacaaattatccaaaagaactactactcagtattttttgtataacatagtttatagacaagtatatgataactgatactcttgaagggtttataagattatttgaagatactcgggatcatcatatattagtaatactaaggccatttggtttacaatttactatatgactaggctagaactattgatcaggttagacatgctattttttttgcaattgaatcccaatagtgcttcaaaaattaaaaatagtggatttatggtccagtagatgtagtaggaattttgctattttctgaaaggttttgataagtggatgtgcgcattatcatctctttggcttgttttatcagatcctttgcatttccagttacagaccaatgtaggaacaatatctttcttcttacttgctaaatctcttcataatttctttgtcatgttctttagatcagcatcgagtcctggtgaaaattcttgtggagcttcgggcatactgggtatttcaacaccttcgggaaatccttcaataacctcaagggtaccaccatcatcaaatggggaatcacctttgaatatcttatctaacaacgactcttcccccttatttgcaaatgtccacatctgattatgtagattcttgctttccagatctcttacttctggcatattagatgtatctattcttggaacgggtaatgatttcccccaattgactccaagagtctccaatgctttagcaaaaaccttttcatgaaccaaatcccttacgattaggtaagaaactgtagacctgaacgctttattatcacacatttcatacaatcgacatttttgtaatcttcctgtggcctctagcatcaaattatacaacatgttaagcacaagatttccgctatcgtagacataagaagcagaccaaggatttcctgctgcatctacagggcgtgcactttgagctgcaaccaaaaagtgatgaatattaggagattctaaagcgatagataaaggtagttcatttggattatttgaattagttgaagcaccttctaaaagaatatttattgtgtttgttatttgttcaacatgtcccatctcttcagtggccatacttcttagtaaatcttgataaggtttggcgttacctctaaaattcatgttttggaaaaaatattgcatcattgtacgcatctctccaaactgacctcctaatccttcttgcaaggcttgagcagcttttggatcaggtttatctgcaggtggtattggatgtggaatcctttttactgataaaaacatatcataaattactaatcatcaaagtatttatcaaaggtacttaaacaacttaaggatcatattggaaaatcaaatcttaagcaaatcattctaatattactataaatgagtacatgtaaaaagaataaaactatagtttaattccatttccaatttttacaattaaagcataactcatctcaggttccaatctgccttttagtaacaaacgtgcataagaattaagataatattcacaatctttgcgttgaaatccctcagtggcttcatttatcactcgtcctttttcatagtctaatttttcacctctctgggtgacgtagtaccagagaatatctccaggcaacattccgtgtccccttggagaaaaaaatttagatattctttcctcgttattcatacttccctctacaatatgacagagcttctccgctggaagattaaacttacatttgtcgcatgacatttgttcatttgctcggttggagccactttgttctcgtcgttgctctatataattggcatcaatctttgaaatcttttggccagtcgacaaaaaatttaccaataaaaggtctgtatcatgtatatcttgttcctcctgatctccaattgattttgtaatgtctgactcttttgccataactgaaactatttagtttatcaaaacttaacaaccaaacttagcaacgtttacattcataagtttaataaaactgctaaggattcctaggattattcatatacggtattgtcagaattgcattattttcataacaaaaacataaaactgtactgatccattgtcaccacaggtgccacatatttacaatttgaaaagcaagttttacgcataaataataaattagaacatgaaaagaattaatttctccattgcttctttctccagcggtcctggaattgcatctgtatattcataagcacctatgacgagtttatgacatcctggacagaactgatgataattgtcatagttcattcttgtttttttgttccatctctatcttttttccatttgaggttgaaatgtaattgtaaagtgaaggcattgcatacttaattaactatcgacaataaactatgttaaatgtaaattctaccactttccgagttgattgctataaaccgttttaattaactgattatctggttctagttttgtttctatctgttacatattttttaaaaagaaacatttcatccctaaaacctgtataatgccaatagtatttattgacaaccattgaaattataaaccagataacactattcaccacaatagcaaatagaaaaccgtaataatatgtcattataagaccagttattgttcctccaataagaaaaggaatttgacgttgaagtgttgcttttaatattgtatccaaacgactctattcataaatatacatgatagtttttaacaatctataaaattatcgagaagactgaacttcttgatactaaaataaggccaatggacgaacccgatgaattattgtctgatattaaatctgttactaaaaaaaatagtagatatttttatactttattgatcatttattatttacttattacttgcaccagttaggaggtagagaaaggtattaacaatgattacttacagtttatctacctcattttattatggttataaactatcgtatacattgtatattgcaatacaagcagcgcgattccattacgggattgaggtaaatgactaatccatataccaacttgacgaggttgttgttgttgttgtttgcctcttcccttttatactgttttattattatcattaaatactattttaaacttgaatatttacctctccgacactcgaagggacatcggcattactcagagatggggaatgatgttcttatgttaatcgcataactttttccctattcctcatctctggttagaagacataattagaattggttatgttctgatctggataggaatataaaattaaaatcctcatgagatatcaacaaggtaaacagactttcgaattcatagtaaatgagtcaactttgttattttagaatcaaatcccattccttattatttggatttcattaaaaagaaaaaatttgttagtctcaaaaataattcattttgaacctgcgattaaaaccagaataaactgtgatggccagtagcctcaagccgacgttataacttttgaacgatcgacagtaagattctttaatcagtatttggcacctaagctgatcgagatccaaataacgtatgatattcacatttaaaggtagttaggacattcatctttaatttctcctcgtctgtttccataaatcatacgaaatttttgaaatacaggatagaaaaaaaatctgttaactactgtatcaattggtttttagaataaaggataaacttgcaattacgattcaaacaagaataatgagactatataatttggttttaacatttaaaagtctgaaagataaacgatgttataataaggtagttccatttatattgaactagtttaatttattccgctgtctactccaaaatttaatacgattctcccacttatggaatgttaaatactttattatacatattagattgtgaataatactaattcaagtaattttaactggaaagataatagtatagaatggaaagacattattaaaaaagaagctagaggatatgagaagggagatgatttgggtgaggtgcaagaaatcggacaggaatttgttgtaacagaaagggggagagtcaaaaaaaacaaattttatttacctaaactattagttgcaggttatgatggagaagttctttggtttaatataaccgaacaagaagctgaagacaatttcaaaaaagatgaaccaccacagatgggtgagtattcaaggtacaagtcagcatctgtaacagaacaaccagatacacaaacgtccaatcagtcagaatcttcgcgcgatcttcaaaagtatattccccttattgagaaaagaaaaatagataatgttggtactgatgcatcgtataccatgcctcaggcgggcatacaagattgggactctattctgaaaaagggtgcacggacaggggattctgtagcagtaggcattgtaacagcagtaaacgatgaaaatgtaataataacttctgatggtgctaaagatgaatttagtataccaaaaaacgaaattcaatcctacaatggacaagaggtagttctaaatacaacctacgataggttaagtcagttcaaggtaaaagttccaagataggcggaaatacaatacccccacaacttttgacttaaatgtaacataatctcctaattttacttatacactgattactttgttcaaatttgatggcctaatttatcatcataaatttgatatggtattacaattagtaaaataaagaaagaataaattcaactttggcaggcttaaagaggagataaaattccatgttaagtaaacttatacattcattttcttcttggtctcattaacctattaatcatcatatggaccccttttgtggctaataaagttaaaagccattttctttttgacattttttattatctgcttatatgataaatgtaaaagctaagtaaaagaggttaaagatttctttctttatacattactgtcagaaacattaaccttttcagacgtaacttcttctgtaaattttctggtttctgttacgggttttttctttaccactacttcctcttttacatagggagtttttgaaacttctacttcttcactctttaatggtatttgtatattttctgttgaagtaattggttcttgtgctgtcgacgtatctccagttggttgtcttctttcaattgaaacttcttcatgcgttactgggacttcaatagtttttgtttctgttacaggttcttttgtaatatgtgtttgactttcttcaactcttttggctacgtctaatttttcctcagttaaaggtatagtcgtctcctcactttctaaaatacttgatccttgatcagccttggattgagatgattgggagtaagaagccggataagattctccttgatatgtgcttaaagcttcatcataagaaataccaaatcggagaacttcaccatcataactttcaaccttgtcttgaggtatgaaaaacttctctttatcaataatacctttttgtacaaaaacataaccgtttgaaacttcttgaacttcaccaaaatcttcatcatttaatcctctagcttctttttttatgacatcattccagtcaatattagaactcataagaatttttatataacatagtataaatagacggataaaagggtactcctaatggtaatagatcgaactaacaaatcatgattggcttttaaaggcaaatttcgataaacgttgttgatatcttgtattgtcattttcgttatttgattttcgacattttaattttttcttaaaacaacattgtaccatgaattaaggtttcgggtctagcatgtcagcctgggatataaacatcttctggcacaactatctctattactgacttatttaaatttttatacatataggatttcagtgccaaacaaaaaagaaaacatagaaaatctgcaaaagaagttaggtgaagttctaggtttagaacgagcagctcaaaaagcagtgaccgaactaatatcgatgaaattactaaaatctggttctaagtctgaagcagaagaaatccagggagaggcaagtactcatgaagaaaaaattcaagaagtagttaccattttttctgaagacaaggatgtaaaattggacattcgcaaagtagaggaaagtgccaaagaaacagaggagaaagcaactaaaattatgaaaacgtatcttggtgaagagcccgatacaccagaagcattagaattcctgtgtttagctgaaggcggagaagtttctcattatgaagtattacaagctatttgtgggaactttgataataaaaaggcgttatcaacagtcaaatctatcctaaaagaagaacaaagacatcttactcaatgtatcgatatggccaaatcggccgtctcataatgaaatcattgcttaggtcgtcatttttaaaattcatctttcatatttgatagagagtgattttgtctttgccttgaagtcagtagaacaattaaacaaagaaggtaagattagaaatatgcgattaaaaatacatagatttgatcctagacctaatcaacaaagttcatttacccttctctttaccaatggaaccaaggtactttgttaaaatttcagcatggatcaacatgacatgctagtatgcgttgaagacaattttataagtgaaaaagaaaaaagaactttttaatggcttagggatggtgatgtaatagaggatctacaggattatacatatcttggaacgagggatggtggtctctattgatttgaaattacaggaaaagggatggagtaattatcaaaatactcgctcttccctttatttaataaatatccatttttttgattatagaatagcagtaactgcagggcaataacacccatagttaaaatcactgtgacaaagctagcctagaagttacttagatgtgatagatccaatccactcattccataaatacctgccatcaatgtcaggggcgataatattacactaaaaatcgtcaaaattctcataggatcatttaactgtagagaaacatttgccatatacatacctcgtgttgaatttattgtatctcgatacgattctactagttcaattagctgatttatatcatcatgggccaagcgtaaatatttaattccatcttctttatctgtttgaggatgtataaggaaattcattatatctctcgtatagcaaaagtgcctccttaacataaatttgctttggcattgtatctaaatacctgaacatgtcttttgaaggcttttatatagagacctttgttcaaaatctgcattagtgagttctatggaagttaagagttgttctaacttttacgataatctcgttgattatggtatgataaagagcatccatatgcgattgttttaaattcttgtttttctgttcaaaaatacgttttactgaacttatcaaatcaatattggaggaatggatagttattaagcaatcctttcctaccaaaatgtatattactctatacttaaatgaagagttttgtatcccgtgtctaagattattgtaaaaatgtagttatttatttaatttaactccataagaaccctatgactgataaacaaggaaaaacgatttcatgaaaaagaaacgagataacatctccatgacatttgttaatttgtcacaagcattttacattgatagaagactgttggtgcccagcatgtctaatgtccccactcaaatacttattcttcctttttagaatcaaaaacatgaaaatgtgatctggctggataccaatgctgtctatgattaggttggagtaagttcataactgatggtctttgcttaattcctttctgtttttagaggtaaagtgtcgccaaaagttattgtcgatatcattgaatagtaactcaatttcacattaacgattcattattaaaacaagactaacattctttattcgcctcggataggcaatatactcctactcctactaacgctatggaagagtcttcctataggctataacaatgtgtttagtatttacttatagtgattgatactagtgtgttcctttaaaacttgtcttgagtcaaatgtttgtccacacgtttcacaggaaaaggttgcctttacatttgttgaactttcgtctgaatttcttccactatctacttcgaaactactcggtctactttgattgactgatgaaccttcgtatgtatgattatctgaacctacctttgtcattcccctcttacgatactcctcttgtgcttctggcgtatctgttccagtttgtccgcctgaagtaattttctgatcatgggggtctcttttgactgctgttggctcaccggtgttaattttagcaggagtcataggttctttatctctatactcttctaaaggattatcatccctacttgtatctgtaccaggtccgccttcttcgtatattctatctccaccagaagactgtacatgtccaacagaagatgaagctattgtatcttttgtcttatccgtgacatctttagtagtatctactaccttgtctttgacatctttagtagtatctactaccttgtctttgacatctttagtagtatctactaccttgtctttgacatctttagtagtatctactaccttgtctttgacatcacctatcttatcggagatattgtctagaactgattcgccgtggttctcccttttttgttcaaacattttaagttcggattcagtacttttcaacattaattgcgtgccgtcatagccttcaatcttggatttcggtattgtgtaaacattttcacttactttatctttttctactataatatagtcatctctttcaccaattatgtttcctacaatttgacgatctaataaaattacccctttttttgatacgattaattctgcaaaatctatatttgacatatttaatttggtttatataactatataaggctcataattttttaacatccatcaaaaattagatttatcttgattcataaggaaaatgactgttgttagtcactacttttatagattctgctctacattcatgaaaagcccggtctcttaagtacaatcagagtatgctacattaggtcggactctaaagtaatagcaatcctaattgtggtactatatgaaccatcttgcttataatatagtaatgaaaaatctttcaaacatgtttatgatttttctaatagcagtcggactggcaatagttcctgtaattagtatgaattccataaataatgttaatgctcaaaatcaaaatcaaacttcgacaccaaattctcaaaatgatacaatggcaacaatcactgataaccctcaaactacaattgctaatcaaactactattcctgcagaacaaacaacagtaacggttaatcaaacgactaaccccatcgaccaatctcaacttcaaccacttggaaatcagacaataacagctcaaactggaaacttgtctaatatagaaaataaaacggtagtacaggccacgggccccgccactactactattgcaaacaaaacaacagtaccgtttaatcaaactactatcggtatggacaatgtgacaaaatcctgatcatgaatatccccttagcagttgcaacaatcgagtgggatcataccggaggaggatcataaagtcaacaataacaatcaccaccccaaaaataaaagtaaaggacagttagacacttggtgaatccgttaataaaatgacaggaggctggggttattatagaaaatacaatctctcttcctgacatttgtattttattataatctgcttttatgtaaattattatccgtaaattaattaaataaatcgatacctgctataaataccatgataatatcattagatatagaatgattgctgttaggtagataatgaaatagacctcttcttcaggtgcgagttatggcgccgcccaatagggtgatacaagccccatgtcgtatggagattggacaatgtcatacttggctacgtaggatctgaggatgctaattggtagactcttgtaccaaaaaagacaatgacctttagaatagcacctgtgtctatttgtatccttttgtaatagttaagaaataaatataaaatttgtaaacaaccacttgttatagaatattgcttaaaggtagacattgtctaatattttggttgccaagaatgtaaaagattcacaacctcagattccaacacatcaacactctgttatttatgattatgagaatggtgaaaagatctgtaatctctgtggtatggttgtccaggacaaactatatgatacggaattaaatatagacttctataattatacaagtgatactaatactggatatccacggtccctaactctaaatgtccatggaatgtcaactgctattgcagactataatactaaaagctcaaagagattttctaacaaaaggcaacacaataagattgaattccttactaaaatagtaagttgttcaaacaagaatagaaatctaaatatagtcttagatctgttgaacaggttaaaagacaagttgtccttgacctcagtatgcatagaggacgcacttttgtattacaaaaaggctcttacaaagggactgataaaaggaaggtcaatcaaggaattgatagttgcatgtgtttatgtagtatgtagaaattcgagtattccacgaacgttgacagagatttcacaaatagtagaagcaaatgagatctttgctggcaagtgttataggctcattacaagagaactaaaaataactcccgtccaattcaagccctctatttttattcggaaaattgctgacgtggctaatattcatgagagaacagtaagagagtccattgatatgctaatagctatacaaaatgaaagcatattatcgggtaagaattcactctctttggctgcagccatcctttacatcatgtgcaggaaacataaacaaaaaatttctcaagcaaagattgctactgctgcaaatattaatatcatgactttacgaaaaaggttgttagaggtaagaaccgttattatgaatacacctttcttaaattaataaagtcgttatattagtaaagtttagaaagctaacaatctatagatacagtaaaacatgacctattttagacgacaatgaaattaattaacatacaatgtttaatcgataagttgtacgataattgacgatccctcaaaattgtaataagaacaaacaggtcataaagattattcatcgatggtacttttcatttaactctctaatcagcacatccaatacggggtcctatcatttttgtaattattatgtttatgtcgggtttataatgatggttgtcaaaacgcaattgctattctgccaacaaatccttaccatacattcaatttttagtctcactatttaatttcatggattgttttccgccgccctctagaagggcagctctgacaaggttgatgatctcgtaaaaatactaaataaatttctactaggcaacatacaacttacaatcatataattaatatgctttgtatgtcttgacttctgttactaaatctttattcactggttgaatggtctaatatattaaaatttaataaggcccattttccttaaaaaggaacaaacaaaagaaatgaaaattagcttgatgtcttgggatcatagttgattttgctatatacatatggaaaaggcaagtctttatttatgtttcttacgaactttgggtctgtagacttttgccggtgttttaacaattgcagggctagtcgaaattctcctacaaacctgaaatataatactgcttttaagataaaagtaatacgcgatgcatgaataatatgaaggttatcgcatattacagttatctattcaaacgtttgaatattatattctagttagcatcatttaaaaccctctcgaattatgtatagttgaatttcttctttaaataatttgactcctaatttaatcagaggcaaagaaaacccagccgaaaagagtccattataattaacttgacttcttttaattgactaaattaattgtttcccagttagataaagtgagtctttttcagatgccctgtttatttgtcctgttcctctctcaggatgtaccatacaatcagaagtggttgcaaaaatttgctaaattgatattcaaaaacaggaaatatttaaagtatggtacaaaaatattttgatgagtcttgaggacaatacaccaactagagaaatgcttgttttatgcggacagttacaaagtttgtacgatgctaaaaaagcactttggacgatggaggaactataccagaagatactggatgactcaagactgaatgaacctatgctgagttttgaacgttttaaagaggatatgaattggattataggacacggcttagtctcttttcaagacgataaattgaatcttgatgatttcgctaaaaatttgcttgtacatttttttaacgaacatagagagatcttggaagatcaaacctctcaataccaagatgacgcaaacgggtgaactagcggaattagtgcctgatatcaaatcagtatcaacaataatagcttaaagtttctctatctcactttattattgttataaaccatcgtatacattgtatattgcaatacaggcagcgtgattccattgtgagattgaggtaaacaggtaatccatatacccgcatgatgagcttgttgttgttgtttgcctcttcccttttatcatgtttcattatcaccgttaaatactattttagactttgatatttactggattctttccaccttatctatttaacctatattaaatagcatatattggatgaataattctatattgtggtctaatgcaccacaatcaaaaaataaaataatgtcgattacattatcaatacttttattcagtgggatctatgttgtcgctttatcaatagaagagtacaatactgttcaagcacaaggacaatctcacaatactactaatactgctactcctatgaatgctaatcaagctaatgctacttctgctaatgctacaaaaccagttgatggttatggcggtccaccaacaggtccgttaaatgcggttcgacacgtatttgatgaaccgactcttagagtatatcatttttgtaaacctaatgacaaaataatgatggtatgtcaactatatgatagcagttctccaaatgcaacgttgataggagtagaatatatgatagactctaaaacatatcaagcattaccagacagagaaaaaccaaactggcattatcataaggaagaattctctccagacagagcaaatccaaaattcccattgctaaatgatcaacaacaaaaggaatggttggtgaaattatcagagtcatatggaaaggtcatactgaattggaatcctatggatatattgcctgcattcccgcctcaaatacaacaagtacaacatccttttatggtgaatcaaacagtcagcaataatactgagaaatatgttggtagctttaatcaaacattagactactgaccttctgcatagaattaaagataataatcaaggtttgagttcgtcaaattctattctgaagttagactgtcatacaagtgagccttttagttaaataattgatctatcattttattattgtactaaatggaattaaatatatctcgagttttcgggctagtatagtacaagactctgtagaggacatatgaatatgaatatgaatccaaaagatttactgatgatcaatgccacaatcattggtggatttcttattttacttacaatttcatcattttctccagctgaatttcctaatcgttctatgtttgtaaccattgcagttgcaattgtaattatattctcatttgcttgcttcaattatctaaatgataatgacaacaggggaatattattctctaagataggtttcttatcaataatattattcatgatattcatagggatgctaaatattattaatataatagatcctgcaatatggtcggaaatacccggtgccgataaaatagctacaaataatgggactttaaccatttagctatttcagaaaagtgttgaagttgtacgtaactccaatttatcagcaatgatttacaacaaacttcatgaccacctggacctcgatgcaagggaagaaaacaaagtcatttctgtgcctctaaatgaggttaacatttcaatcttaaatcaggcttagttttctagaactatattctaaataagttatggcaatctaaaatggaacgaggatttgaaatgaaatacctaattaatatgaagtcaagatggtctattccaaaaatttttttcgcttcggatttactatgcaacgtctttgaaaatgtcattattatttaaactattattattatgttccattatatggattgtacagataatatagtaagtagatttcgagaatttgaagagacaatggcaagttgtctgcctaaagtagacaagaaattgatcattgaattgctggatgacctaaaagaagatgaatatcctggttacaatcttcaaataaaattgatagatggctttaatgaaaataattttagggaatcgatcttgcgcgacttgggtgttgtgcccgcatttcatcaagatgaaaaatatggtggccatgccgctgtagaacatagggttaacttcaaaactctttcttacctaagtaatttggaggatattgaatttataagaggctctagagctggaggtggaagagcatctatagggccacaattagaaagggatgaacatgataaaacctatggtccacaaggcggtaaagcgtgacaaggacctacatctaatgccctagaatgcggctaaaaatattgaactatttaatatttgatgtaccaaatacatcatgcttaaaattctagtcttggctatgatagtgacaactacagcaggcttttcaatgcaagtgtttgctagcagtggccttggagtttttcttgataacaaatcatcagataataaacatttatcttttactgattctcttgataaccaaaatttgaccttaacaagagataacaccacagtcggggctgaaaattcaccgagtaacacactgggaaatatatcagaagaatcacaatcaaactccaaatctaccaacatggcacaggatactggtagttcgtaaaaagtttaaaagaataagcagcataatgaaggaacaattactttacaacatggtttttaatatatgaacaggaaagaatgtagggtttctaatcttatattacctccctgttagaagccaaaaactatgtttgttgctttgaagtatgaccgactgtattctgtattctagtggaatccctaatgaatcatatcctaaagaatggttgtttcttatccatgactttgtgtgttggaaatatccattgcacatcatgaccttatccattataatgcaataaccatatttacaattaactttacttttttgataaaatagtataacgaaaaatactaataatctattttgaaactacgaatggattaaaattagagataatatttatatctattccaattgattttataagtttgatatgaagaaaagtacctgtgatgatatattaaaccatatatcaaatctgactcataatgacatcatatagatctaataataaatcaatatcttgtcatcggctgtattgtattcaaaagtcgctcgcagatgtaccgagtgctcattctattattgttatgaacacgttcaaacacagccacatccaagagaaagcttgaaattcaaaaattttcaatgaatatttgctaatcgtcagtgagatttcatatagatatcatcgggaaatatatttactagtattgtcctgacttttctacctcaaaacttctactacctttttcgctgctagaaatgatgacgctggattttgtcctgttataatttgtccgtcacttacaacaaatggtttaaaattatcagttttctcaaaattgccgcccaattcttttagtcggtcttctaatgaaaagggaacagtcttatcgagtttaactgtttcttcttcactgttagtgaatccagttactcttttgttttttaatatagaatctccgtttttatctactgcttgcaataaacctgcgggtccatgacaaacagcggaaatgactttcttgttgttgtaaaaatcttccacgattttttttaaatctttgtcttgggataaatcccacattggtccatgaccgccaggtaaaaacaatgtgtcataatcactagttgagacctgatttaggataagtgtatcttccaacttttgcatggctgatttgtcgttttgaagtcgatgagtatattcggtttgattttctttcagcatactttttggatcaacgggcggttttccaccctttggggatgcgattgtaacttcatattcattatctacaaattcataataaggactggcaaattcttcaagccagtatccggttttttgtccggtattacctagttgatcatgagaaggtaaaacgaaaagaacttttttcatgtctttaaatgtttgacatactataaaacgctcacagaagaaggcggtttccattttatccgatttagtatatgatctttataatctgggatcgatagttcccagatattttttcgtagtcgcgttttatcatgaccgttggatttatctctcccatatcgatatacccatggatgcagaatcacccatcaatgttttcaaattattatgattaatcactctttgagtttgagtttcaaaaaaattttgaaatccgtatgcaagtttaaaatcatgtctcttctgaccattcttcaattccgcctaaataccttgaatataccatgcatgtgacaaaaaactttttacatctgtgctattgaactttattggattagaggccatttttgtttaggttcactatatcaaaaatttcgtgttttccacatgtttctcagaacccacgagtactcgattatatttttccatgagatttccgatagttcatccaatttaataaacatgaatatgcttctggcgtagtgaaaggataatattgttcgggttctcctgaatatactatctgttttgctgcgatagctttagttagatcaccattattgtatagagaataacatctttccacttgagataatctagtgcacctaaacgaatcgctgaagacaaaatcaaaaaacctaaggtttgatacggcgatcagtaagtgcaatgagtttacgaatttcctctatagtaagagatcagtggctagtgcctctgaaataaatggattaaactttttaccaatatttgattgacatctattgagacagctgatagaatctgttcgttgaactggatttctttagagttactagaacattgggtgtcgcataagcagcataatacctaacatgatatctctaatatggtcttttcaaatcatttccttaacctgatattcattgcgaattcatagctatgtattaacctatattgaccatctattgttgatgataggtcatgtaattttactaatattgattttatctatcttatcagatagccttggcactgtgtatgcccgtcaaaatatttctgaagaaattcataagatgtttagtaatttgacaccggattatcttgggttcaaaaatttctcatacgaatacccgggtggtttctcaataagttccatgccaagcatcaatacaagtaataattcaataactggcacacaataatactggtcaaggcaagattatatccttagtaatagaacatttttcggaaaattgtaaaaaatagtaatattgtgataaagataaaatttctcaatatttcttaaaacttgcaacgcagctgcctgaccacatagagatacccaaaacttagtttatgaggtttaggaaacaaagatatagaataagagaatgattttgtatatctctatattaataacactttctaccgaaggataataattaaatgctattaattagtatttattttttttacaatatagcctacctctaaaataagttaataatgttcttgatgttagatttgatgcaagatctactattggttggaatacatttatctaagatcttctaagatcactttggctatttttcttcttgtggattccttcaaaacttgcaacgcgaatacaatcgatgtacctcccgtcatcatgcttgctatacctaccgatagttcaggtaatataatatttatacttgttaacattactgtgccagatatctaacccatggttattaattttttattcatatcattagcagtggcaatttaatatataaactagtgctaaaatagcaaaatagtgctaacttttacttttttaggaagatatagtcatattttgcatggttattgatttagggtttttaatggaaaggtttgtgaagtataaaatatatgatcgaccttttcaataaatttcacttaaaaatttactcaagcattataattatagattcctaatcaaggtataaatttgctaatgtaatataatttcaatgaataaaaattcattaatctttttagccataatttccactgttgttttatcgagcggtagcatggtaacaaatgctttttctagcacaccggctactgcatcatattgtcccccaatatgcttagatgaggtacaacaacatgtaaacgatgcaagaaatgcactaaatgatggaaaactaattgaggcaacatctgagttagatattgttagtagcttattagaccaattagacgatatgacaagtaaatcagactaattctttatttatttcaaatattattttagtatactaaatcaaataataatactaagttctgtttgttagaacgacaataaaaatatagatatgattactgatacgggctcaggcgctagatttggttcagggataggctcaggagtaggtcgtgggtgtgatcaggaggcattcatacctatatagttttttgaagttctatcctgcaataacggccttattttaactagcagtctcgcttggataattttataaaaataaaacaaaaagaatacgatgatcccaatcccactaatcagatatcggatggagtggttgtctatgaaagttaaattgtgaaactggaccacgaaattgttatgcttagatcctgttctgcttcttgttgtcctcaataatttataaatatttaagtaaccttgggggaattatacaatgatttgcaaaatttaaaaaagattgataataatatagcgaatagacaagtacaactagcattcttttgtaaagtttctaaaaaaatagttaactagaaaaatgaatatttctttaattctacttagcattgttcttttgttttttatgtatagcatttacgttcagttcgaatttactaattcattatttgcatttgaactaaatacagcaatatttaacaatggtaacaaaactaatacttttgaatcaggtctaatattcaacaaatccaattatggggctaatgatagaaatgaaagccagatcaattatctgattaatatcagttcaaacaatggccattctgagttagcaaagtttgctgtagctgggaagaatatttctgtcatatggttagacgactcatcgggatacagagatgttcattttaaaagaagtattgacggtggaaagacatttgaaaaaactatgaacttgggtaatattcccgggggagcatatgaccatcagattgcagtaatcaataattatgtttttgtgatatgggaacagtctccagataacaatggtcaaattttttttaaaagaagtattgatggtggaaagacatttgaaaaaactatgaacttgggtaataatacaggattatctggtacacctcagatattggtttcaaaaggcaattcagtagagaacggtggcaattcccttcatgtatatataatatggcatgactcatctgaaggcatagtattaagaaagagtgatgatggaggcaacacgtttggaaaagccctcagtttaagtgaaaataatccatttgcattttttccaaaaatcgctaccaaaggtaataacatatatgcaatttggataaccatttataataaaggtacggaaaatgagacaagagatgtttcatttgcaaaaagcattgaccggggaaactcatttggcaatgtagtgaatttaacgaataatgcaaagatttcttttaatgcgcaattagcatcctcaggaaacaacgtatatgttttatggaccaatggtactattgtaaaagatgattttcctatacttacagatactatgtttaaatatagtaataattcagggcaaacatttcaagacacaataagtttaaacaattacacaggatggtcggttaatccaatgattaagatcaaagacgataaattatacatcctctgggaagaaagaagccaaaatagatatagcgacatatatttttgtgtcataaatattaaagatataaacgaatgtaactataagataaacgtaagcaatgatagtaacaactcctttaacccatcttttgatatattaaataacagtgctcttatagcttggacaaatgaagattcaaattatacatcctctatcattattaaaaaaaatatcaatccattgaataatttcacagaaattgagacatcattaatggaaaataatacgtattacttaaatccacaggtggtattttccgatctaggtaatgaagcatttatcatatggaatggggattcagacataaatgacgaaatatatctcacaaacattgattatgcaaatatagatgatggaaaaaacgaagtgaataacaaaaatgtggtcactaaaatgaatacgactctcacctacaatttagataattattttcctttgagcaatattgatatcgaatatccaaataactctacctccctaaatactacccatggcatccgtattgcacttgtcgatccgacatttacaaacgctgcttacgataattccttttatatcttctacaatctttacaacaatttctcgttctatcaaactactacaaaatacatcaatttactagaaagcaaaattgacaaagattcaatacctgattatacggaactttatctccaaaatcatatttctaatttaatgccaagtgcaaatgttacgatcatatccgatcttgatgtccataatagaaatatttttaatgacaatacaattacatctaacaaatacgatgtaataattttaggacatcaagaatatgtaacccaaaaagagtatgattacctgagacaattcgtagcaaatgggggcatactaattcttccatatagtaatatattgtatgcagaggtaaactataatcctaaagataatacggtagttttggttaagggacattcttgggattttgacggcaaatcagccacaaaaagtattattgcagagaggtggataaatgaaacatccgaatgggttggcagcaattatgccaatcagtcctctggaatcatttttggaaataatccctttggctatctaaaacatgaggaacaatttatcactaatccaaaagtcaaagttttacttgattacaatgtaactcttccgactataaatccaaaagatttccatgactttagaattgccgcatatgagcacaattataaagaaggtaaagtcatacaattggggatttatccctccgacgacttattaaataatgatagatttaatagattttttgatagcatcttgttaaaatatatcaattaaattaaaagaaggttttagacactaacgaatacatttattacaaatgacatctagtagattctacaacagtgcctgaccttcaactttccgcatcaaatccctgaagagtatttcataaacctatacctcctcaatttatttgtgaatatttcaagagctgatggagaccagatggaaaaaaataatcatgatatttgagaacaatttataaaacttttagacgaatattatcaacaagaaattttctcaactggaacgaataagtactaaaaaatggtaacatcattgtaagaaaatttagaaaagatatgaaaactgcattaagacaatacgcacacgttaatgagtaactttctacgtggctttatttttttaattcgacaagtaatcttgagttaaagtggttgtaaccagaattaatgccttaggacaagattggttctttaatttatttatgaatccattttatgaaatatagtttacgccctcttaattatgtagttcagtagtggtgcggactctagtatatgagcccatgtagttaatgggcccaagggggctaatgctgatatcggttctttaaaagagattctataatccaatgatttaatgcaacatttaaagttttagcgaatttgtaatttaaccaattattacaaatagaaatgcaaaaatgaacgggtaaaagcatgatcacaggagataatatagtaataaaagaaacgtcgttgatctttcaaaaagaaataagttattgttgtgctgctgcattgtttccagtgtttgtttgactctggtcatttacattgtttcctgagccagcagtattaccacctgatacaacgccgctaccttggttagaggattgtgattggccaataccttgattaacggtattaccaccttttccgccactacctccttgttgtgctgctgcattgtttccagtgtttgtttgactctggtcatttacattgtttcctgagccagcagtattaccacctgatacaacgccgctaccttggttagaggattgtgattggccaataccttgattaacggtattaccaccttttccgccactacctccttgttgtgctgctgcattgtttccagtgtttgtttgactctgtgagtttaggttattacctgagccagcagtattaccacctgatacaacgccgctaccttggttagaggattgtgattggccaataccttgattaacggtattaccaccttttccttttccgccactacctccttgttgtgctgctgcattgtttccgctatttacttggttttgagcatttagattgttgcatgaaacaaaggttcccgttccagaaacacataatgcattttggttggaggattgtgattggcctataccctggttggcttgattgccacctttaccgccgctaccgctttgtgctaatgcgttatttccactattaacttggttttgagcatttagattgttgcacgaaataagagtaccgtcgccagatacacaaacacctaattgagttgaggcttgagattggccaataccttgattagccttattgccttgagcaaatacgttcatggtcatcaaggttggacccacaagaagtatgaacgtcatcgctagaactgttgatgtaactattgttttattaacactaaagatattattcatcacttcaaataatcatgcaaattatataaactaaattctatattccttagacataatattttattgtgcgtatgttatatatgattttatttcttatgataaatctaataatatcggtaaaagcaaatcatattgaaagataagaccaatatttcaaaactaatctatttaatgtatgataagtataaagtatcatgaaatttgttttaatcttattccctctatttttattacctattttgcaagttgcatacggtcaaagtctgactgattccataaataacgcagtaaataataatattgagaacacatttgactcgataaataaggccgccaatagtagcagcaattctccctctggaaatgataatggctctcagtctaccgctaccgccaccacgaccacaagcgggccaggtaattcaaattccacaactacaactatgaaaacaaacagtcaatactagatcgagtatttatttttttaattttgtatacgaataaatttaacatatggtaattttgatttaaaaatatattgatcccttttctttattctagacacaatttactgtttgtaggtactgggtcttggtattgagatctgttatgctatctcaagacctttattggcttgcgccaaagcctacaatcttttataaaagtattaccatttactgggggtattgtggatggagatactatttactgtttgtaggtactgggtcttggtattgagatctgttatgctatctcaagacctttattggcttgcgccaaagcctacattcttttataaaagtataaaataatacgtttgtcgatcttaaattatttacgaaggaggaattaattaccttgatttttatatcatgtgggatgtccctgccataatgtagacaaattaaggtcatcttttcttaatattttagaaaatatcttacgaattttatctgtgaagatataattttattgataggaagagaacggtagacgctattgctagatacctaaaaccttaagttataaaattgaacaaatcattcccatgatcattagttacaatcacggcggaatagacatatgccgatccaaaaaatatcatgaaaagagaaaaaacagttcccatgaaaacaattataattttaatagttttgttcataaagaataaaggttgagtgacaattacatcttgatttagtcattttatttctatttttgaaaagtactattattgtgaaagtcatatgcaattataaaaattaaaatgtgaagtcagcatctgcctcataaaagactataatttactcccctgaccatagcgtcaaaatccttcactacctgaatattaactatcattttatttcctctttgaagaaaattattgatttaatccattatagtattattccatcgaaatttatcctgttttatcatttctatcttgagaattttgtatataaacctaaatcgcaaaactgtccagcgatgagtatttccatcacacaaatgaagactatcgaacatatcagaattttattatcttgttttgatttacaagttcctaaatatcagagaaaatgacattaagtatacatcgtttactaaacatttcgacctatgaatagttttgattgtgttggcacaaaaccaggtatcatatagttactaaattggtagcggattcggtggtaggtgaaacaaatttgactcaaattaccaatccacattgtgacaatattatttcttccagttgccaagacctgcttttcattataaaaatgcgttcctctctcaaaaattccctgaaaagggatgcaagttctctttcgtcattgatcacaatacttgaaggtgcagatgacctagaaaacgactatttatattttttaaaatcattgaactatatctagatattttgagttttggtctaaggggatttgaaataggaaataaaagcggttcaattaccatcgtgtccactttgatcatttagtcttataaataaaaccaaaagttccacaaagaagcaaaatatttttagtcgtaaaaaacacagtatatatgaaagttcttaaatttatcatttcaatagttatttgtcaatctgcaggcatctttggttcactttttacaattgaagcagtacctgattggtattctacattaacgaaaccgacatttgctccaccaggttgggtatttggcccagtttggattattctatattttctgatgggagtgtctttatataccgtatgggtatgtgaatctaagcctaaaattagaaaagtcttctttacagtatttggaattcaacttgctctaaatgccttgtggtcattattgtttttcggattaaagtcaccattactaggattattagatatccttctacttgatataatggtaacagttacaataatttatgcaaaatcaatttcaaaacttgcagccatacttttagttccctatttagtctggataatttttgcttctatactaaactttgcaatcttcttgcttaattaaaatcaatcttttatttcgttaaatttgcaaacagatattgtcctccgattcctggtttttcaatttctataacggaattataacactttttgtcctttttttgtggaacccaactaggcggaccattatcgacatgaactcatagtgtttagtaatcgatatattaataatcacttttttctcagtttgttttattactggttgtaaagaaataccatcttaaattgtttctattgaatgataacctatatgactaatattcatcccaaaaaaataaacttcaatttctacacaaaggcgaatggatttattcttgactaatcaagtattgacatcttcagagattgttatgattaatagttttaacgatagtataataattcagcgcaaatatatgcactaatatttataaattataaatgatctaacaatttaaataattttcagtattttataaatcactttcgtcaaaagaagaagtaataaaatgtatatttgaatacaactctagcgttagtgaacttagtatatgaaaaagatcattggcgttgtatttcctgaccttggtaataaaaatatcaaagtagaattagacaattcactttctccaaagacttttcaagcaatatttgatcatctcccagtcaaagtgaaaattaacagatgggaaatgaactctatacggatctcacggaaatagatgtcgaagcggaagagaacgggaaaacggaagttagtaaactggatgtcgcatattggcctgaaggtaaagccttatgtttattctatggaccaactcccataagcaaagacggaaaaatatatgcatattctcctgttaaaattgtgggtaaaagtctagatccacccatgaaagataatattctagatcatgttaagaccaatacaaatgtagtactaaaatagcagccaatttactgaaaaaactatatattgctaaaaaattaaattcttggacatagttgtatggccgtacctaatatgcttctcttcaatcaaatataaatagaaaagaaatgcaagatttattgtgcctcacatagtaattgctggacctttgaaatttgaaaatatttacgaagaatttcagaaagaaattcacaaaatagatgataaaacaattatcaaatataccgattgttttctcaataaggataaaaacatagttttgatgagcacagttgtaattgaaaatcaaaggccaatatctttttacacaataattatggcaaaagaaaatcaaataaccattagattagatcctattactgatccggaaaaaacatttggtgttaaaaagtcgcttgccctaattgctatgaaaatattgaagaaaggaaataatttgaagataacgaaaacaaatcttcaagactttataacccaataaaattcttatagtgagttagtatcgctttaaacactgagaaatacatattttagcatagtttaaaatgctttttaatttttggccatgttatggcggtatttagttacttttcgagttataagcaggattgtgtaagtcataatattacgatatcgcaatatcctctttgctacaatattgaaataatctgattttactaatttatacagtaatttaaaaatagcattgcggctctagtaactacgcattaaacttttattctttctgaaactggtagagaattgtttaatgtatctagacatctgttaactagatttcggttatttgtgaagaagcctctatatttagcaggggtaatttcttcagcaattaatgcacaaccttcgtcttcacttatagatattattatccaattattttccaatccacagtcactaaaatctattatgcctgccaaattggataaactaataccgcttgccaagctggtgtttcctatcaaatacagtttttttgtcagtggagaaatggtgatgtattgttctttgacatcgttgaaattactgttcctttgaaataaagatattaatgtgaatttgttaaaggggggttttattcttacgatgttttctattcctcgactaagtaaaagcatgctttttctggttgttgtataaaaagactcattccagttctctggtgctacaaaataattatttggatagtttaaagtgttattataatccgattcaatttcttcagatggaagtttctttcctttaaaatctactatcaattgtgtaaacggtgtagtacgagaagaattagacattattaatcacatttgttaggtcattaaggctatatatttaatttcttgtattgatttgcattttgtttatttagactatatttccagcatagacgaaaacaatcactttttcttataccttttatttatagaccaaaataaaagaaccaatatcgacgtgagtccaaggaatttaataatagatatattacaaatccagttaagtaactaaaaattattttatattaaatttgttcgaatccgtgtggattagtgccgatatcggtagtcagttcatatagaaatgacccaaattacatttctgatcttgtttggtactttcttccaaagattcttttatttggtttcatcctcctctctctattgttcactttagatccggatgatttattcgctagtcacacttgaggtaattacttatttctggagcaaatacattcttcctgctaactctctgttattcagttttttggtatgttttttattaaatcgatttctattcccctttttataaaagttatacagtctagaaaaatctttagttatttgggttatcgcttctttcatcctgctactcaaagcatacatttaaagtaatacaagcactaggtagcatagtcgatttgcttaatgtaattatctttctgtagtacatccggcgtattggactttgagagttgcctagggagggattcatggaaatttagttctagattgaatatcatcgcaggacaaataatctccctcaagaccttacttcaacatgactataaatattaaaaccatacagggatattatatctaaaaggatgattggccaaaaaatgttaaaatttatagatgacgtccatatccctataaggatagcttgtatttctgagtcgggttatcctatggttgtgtcactaatgtatatttatatggatgagaaatttttttgtgctacgcaagcgacttcaaaacttataaagtctttaaagataaattccaaatgtggttttgaaattgctcgggattctcctccctatcgtggcgtcagaggatatggaaaagttactatagttgaaattttaggagaaaaaattctgcgcatattattgcagaggtattttgagggcaaagagtcatcaccgttgtacaaatttttactatcagagaatcacctaaagacagaagttgctatagtaatatatcctactagaatatttgaatgggattatactaatcgtatgaaggatttgatataaaataagttgatccattatatcaatcactttggagcatttatatttacaatttaatttttgaataaagtgtaatataattgatagatatcggagtattctttattgcaatattatgttaatatgtaaattgaggaactgataaaataataagtagcgcataacatacgaatattgaaggatccatgaataaaaataataatccgctagtgttttctgaaaatgaaactaaatatttgttcgacaatcggttaggcagactagcgaccgtttcgtctgaaaatcaacctcatgtagttcctgtttcatataattttgacggaacagatttgttttttggaggttggaatcttaagcctagtttaaagtttcgacatattctgaagaacaataaagtcgcaatggtggtggatgatttagtgtctatcaatccatgggtacctaggggaattgaaattaggggaatcaccgagatattaagaggagaggattatgttaggatcatacctgttaaaaaggctagttggggtttataaaatcgtcgcgttagcagatgacagcatttatcatttgtagtctaaattcatggtcagttaaattcaatagagatatcagtcaagaggaccacgcagctcctaaattaacatattatctatagattgaaaatatcctagtgttagaaaggaaacaagattaagaaaattttcatacttttgctagtgatccatagagagaaacattccgattgatgaaaagttcctgactggcgttgtcaagatacatgtaaaggagccagtttttatggaaagtaatatatcgtacactcaagcagataaattccttttttgggtgaacgtctaaattttccattagtaaaaaaaatattttaaagaaactatgcaaaatatacagaatggaacgtaaatttttgctgacaatcttattcgccgaaaagaaaattttaaactgaaaataaattttataaatctatgtgttgttactttttaccataggaagataatttatgaactagttaacagaacccctaaaagggatgaggattttttattttatggactttttttgtcatattaaactcaataccatgttacacctattaacatgaattcttgcacagtaaatataattaaataatgataaagatagagttcatcgagtatttcctctatttttattattttcatctcacgatacgttataaataattaattgtggatgaatgaccaaaaacctctaaccgagcaaacattttatcattatcaaccctttaacaagatgtgataggacataatgatgtagatatttctgtaaatggggcgaattttgagggtgagaatgtgcaactattgactgataaaatacaggaaagattatcaagagccataaaaaagcgttatcaatatgaatccaattcaagatctgctcaaaaattcttacttgactttgttaacactaaagttccgttagtaataatgtatgccgatttagtgggttcgactaagatgagtatgagtctgccggttcgatcaatggttacaataataagatctttttcgtatgaaatgtcaaatattataaacattagtgggggatatgtactgaagtattccggggatgcagtaatcgctttttttccctcaaacattaacaagaaatcagcaataaagctagctttagaaagagggaatttgatgatcgtagccgtagaaaaaggtattagccctgtgttaattcagaatgacatgccagaacttaaaataaagataggaatagacgaaggtgaggatctaattatacaatatggtcacgatacgacttcattgatagatatacttggatacacgatgaataggactgccaagattacttcactatctctacccaatggcattaccatagggcagaatgtatttgataatttacctttggatatgaaacagaattacaaggaagttagatttgatgcggaaaaatggaagtatatcaatctccggactggagatctttataaattatattccaatattggttgacagttatgtatccaataggctatattcctctgtaaactaacactgcttgtttagatctataacataatacctttagcttgccaactaggattatcattattatgagggatactttcctcagattactctctggtgatgaaagaactattttgtatgatgatagaggataaggagaataaagaatctggatatcgctcaaagatcattctgcttaaaggtgagggatgtagttcctgagataggatagtaaccaaccattacgacatcaacataagaaagtgaatacaccgattcaatgaacatgttattgaaggaataacttctaaaatatacaaacactgatgaggcattcgattgggtatatttcagataatgtcaaatagtaaatgaactgattatatataatgggaaaaggcgatcaatctcgatatctactattgaccactaagggttggaaaacggggataaaccacaaaataagaatatggtttgtagaatatattggtcgttattatattacttcagaaacttctacaaaagcacattgggttcaaaacattattcactatcctagggtattaattgagataagtaacaatgtattcgaagccacagctcgaataatagataatgaaaaggagcaggaattgtctaacacgataaaggagctgatgaagtctaaatacgttattggctcaattgtcgaaattgaaagggatataaaaaaacaataggataaaatttaaacacatacaagttcctaatatttgatttgatttgatgtttagtaacagtctgggcgcaagggggcttactactagtaaacactgtaatctactacgctattttagatttgggttcttacaaaattctactgatgttctgatatgtttgtattttttccaaaggcatagagatcaaaatgttgctgttgttatttgagataataatgattgatattcttacttgttatcaatgtttgtctgtttggaaatatatagcttttaaacttaagacggctatatactgttagtaattatttaacatcgcgtacttagatgtttgacttttcggaattaaagagtgtctcttgagacacaaaactatccgtaattacccaaatatattctatatatgttgtaatttatttataagacaaaattgttttaaggcggtaaaaaccaatccgaggattgatgtggtagttattgctgattctccatatggtatagactgcggaagaagattgcctgtatcgttattcaaaaccttctatcttataactataatgttttttagcgtataagccttaataaagaatgcatcatttaggcttggtgtttacatctggaagagttgaaaaatacttttctagatgtaataattgtcaatctaatgctttaagaatttcgataggataaatgattaaaaataacgaattatattatttcaaatactttagatgcacatacgatgcgtttattatttaatatccaacatgataatcttcattcaatgaaacacataagacagttaggaaatacgagagtcaaataactctgaaagttttggtgctattagattaatagagttaaatccatctacaaagataactgctcctttttcctccataccttttagttcatccttaaacccttgaagagtaattaaattttcttctgagggatgagtaaagacatgagtatataattcatcaattgaccatgttgtcttttcaggcatctttaccgaacacagcttgtataattcataagcaatattatttttataagaattcatgatccttacattctattctgtggaaactcttcacaaacttcatgaatatagattagtcaatgttctgcatcaattaagacgttatcgtctttgtttttatttttgtgtttgtcaccgtatttttgggttcctccttcgtcgatcatcctttgtctttctatgtcactagtaggaattgacttgttgtctttgtttttattttcctcgtgcattgtgtatgtgtaaatttaccatattatttaacattaggtatattatgtttggaacaaaaaaagtgtcttatgcattacttgttattattacaaaaaaggcaggtaacattttttgctcataaaaaaattactctatttacatcgatcatgatttaataaactataataagattataattagattaatccgtataatgccatcatacatgttccaacattctcattactgtctatctatccatcaaaatgaaaaacaataaaaatctgagctcaaattgatagaataaataggaacgctaccgcggcgtatattcctttgttgttatgttaatgacttgaggagtttttggtcgtagtagatgcgttgtggttcgaatcagctacctcttcaacttctgctgctaattgtcttgaattttgttcgaacactcttgctgtatttactcctgtgtttgataggtgtcttgaaacgtcttttgcttgttgtagtaatggtttccatgcatcaagggttgagaaaataacgttgtttgaaagtctaatggccgatactgtattgtctgcaacattactaacgaatcttgtatatgcattaactgctgcctcaggagaataatagttggtaactaatccagtgtatatctcattatatggtctccatgctgattggagtgaattaacaacttctttttgagaatcaagatattcttctgaaatctcttttgcggtttgtagtgattgctcttgataactatttacactgtcattaattcgtggaatttgttttcttgattcatcaattgattttttgatattatctttagtttcatcaaatgactgattaacggattcttggaaatcattgttattgttttgttgattggtattatttgaataattttggttagtttctattttctttgacatagtatctattagttaccgtactatataaacattggtattaaacggttttttataccaaatagtgccaaatttgcatatatctggcgccatggatagacaaaattttgattatagtcctcatcagtcatactgatgtaagtactctatgtttgtcataataactgtactaatcaaagttgccctatttggcatatcgttttggtagaaaaaataaaattacttgccattagattcgaggttttccttgtctaattatgtctttttgttcttgtttgctattcctctgggcccaggcttcagcgtgtcgcctgtctcatccaaaataacttcactattatcggccgcatcgcctactgcttgttgtgagtcattctttttgttgatgggttcttctgacatcatggttgttaatgcatcatcatttttattagatgcacctacttgacgaagcagtcactctcaaccgcgatgatggatggtgacgatggtccaagtaatacagggctggatagagtttatagctttaattcttatcggattcatatgatgtaatacattatgtataatgggtaaatatagagagaattactttgtttgtagcatgctaataaaccaaaatggactgaaagatatgaaattattatgattagtgattaaatattatgttgtataaataataccacctcatatggaggacgcactgatcgtcgatctgtgataatccgaataaggtgtaataaggctacagtcatgtcataagtttactgccagtggtaggaatacaaaagcatgagagggtctgaggtatacgactaaataggataccaagttactaccgtaataagaaaaaagacctttattgaaaccttattgcctttctaatatcttacctttgattgttgcgtgaaatattctatatgtagaagaatattgaaaatcatacttaaagaagtgatataaaagaatcacacgggaacgtactattcaataagaattcatagggcttcgaatccatgaggtacatgggaactgtaaatttaataaatttttacttagaagaattcaagtttagttaacaaaatcataatattatactgtcagaagggtatttgataaagccggaaagaagatgagtatgtactattgtcgcaaagtttttaccactcgagaaataaatggatagagctagagaccatgacttgttgtagggaaggataagcggttccgtatttgtgaatcattactatagacccgacgtaaatgaaattattgcagagtataaggcctatattgcgcgaactgatgaagagttgattaatgaagtacatatttattcccactacatagtaatattctggttctaatcgatatgagttgtaatggtatatgcgttagatataaagcaaaaaggaatcatcaggtgccatctaggtataaggaaggacagaaaagatgcagcacttgtgagatatttataaaatgggacaacaatgcctattgtccctgttgtaattttaaattaagaacaaggtcatttcgtggttgggagatgaggaaaaagtatagagaagagaccattaagcggtattaatcattcagcattttagaccaaactttttcaaaataatcccaataaggataagtccggttttgggtgagttgattaagaatttgaaaaacgtctttcactcaattgcggcattgcccatttataatggaggaagatatcaatcaatcataaaacaaatcaaagtccatttttttggagtgtgatacaataagatgatttgagtttcagatatccttttgaatgtgattacaaaatacggtccctttactaatatagcatacaatttggtaacaaaacgttgaaatttcttctatagcatttttgaaagaagacacttctcaagttttcttaatttcgtcgtcttgttgtagtcctcgaatttttatttgcatcatttcttttatttcgtttcataacagtacataccatccatctatatatcatctcgaatacatacaacgaaggaaaatctgcgtcttaatttcctttaccacaatttctctctctaattgaactaagtcagataaatcatacacatgattatccatttgtaaatgaaaagttgtttatacatggtttgtattaccgtaggattaaactcgaaagtatctattgtatcattcattacctactatataggctacaattaattagatctttgtatgttactaataatagaattaatttataaatcattatatgtactactataataggagaatgttacaaattaataataaaggaattttaccgtatgatgggtttagcaagttttttgatctagataacaataaagacctctatgatagaaacgaattgttcagcgactttgatgatagctatagaggaatagatagcaagtctaatgtattcaatgacatttcaacgaatgcaccaaatgaactggtaagagaatatggaacacaagaagctctcaaagtacgaaaggtagttgacttgcatatgtaacttgttctaaatttataatatttttgcccatatagtactatgaagttttctttaaataaatcagcaaaccaagttaattgttatttcgtaagcaagggaattaagaataagatggttgaatcatcgcgatcttcaactcataaatcattttagtgaaataaagagactataatttcctcagcacttttgtgttaaaaaattatttgctctaccccaattaatgctttaattattaatataatttttttgcatattaaaaaaaaccttttgaatttgcaaactgttatatttttcctttgataatttttggtttactttgtatgagtattcggtattggccgctgcattctctaatgtgagcactcttgacatactcagaacaataatattgactggatttgcaggtttttcatcattccttggcatatatttatctaaaaggataaacttttctgaacgacatatgttggcacttacttcgtttggagcaggcatcctcatatctgttgcaatatttggaatggtagtagaagctgagaagatagttagtcttacaattacagtttttgcatttgttataggtgcaatcctttttacagtattagatcgtatagccgaaaaaaaagggggtggtgctggaatattattgggaatggagacgattacagataaactttgaatttttctcaatttaaattgttaatataatataatattctaattcagaatttcgtaaactgctaattcgtaataaggataagtatttagcaataagcaacttcatatgaaaataaagtttgtgaaacagaagccatacgaaaactcgtgtattttaattgacttaaaaactactatctgtaattgcaaataaaaaaaattgaatagatagttaattggctattccattgtcatatttccattattagctcgagccattaaccaagtccttaattccttccatcacgccaccagtaacatttgacagtgcttcaccagttttattcattgcatccttcattccctgagttgctgtttgactagacccattcattgtttctcgagcaatttccccagtttggttttgcctcatttcagcaaccattgaatgattataagtatctgatgtggaattagtcagacaatttaccattgacacgtttgttcccatgtcaggtgaacacttatacattgtaacttgtgcctgaatgttattctgatataacatttccataccacttaatgttatagccaaaacaaatgcaattatacatcccttaataatttctatttttgtagatacaatcttagagtgatttaatttttccttaagataacgaaccattagatgaaaaagttgtataataaagtatttaacgatagtaaatttatctcactagttctaaaactactaaatattgggagtttatgcaattcataaggttcacccctctattttagtgcattatcgataaaatagttctcacatgaagtcaaagataaatcttagttcatgattctccgatccttcggtggaatgacaacaaaatttcataatctctatttgttcgtttcatttgtaactatctcatatacctttatgcacatttagagtgaagggatatttctatgacaaatcaaaaggcagtcaaaatagtattgtttggagtattaggaggaatcattgcaagcatagccatgtatccatttctttttcttacaacaagtatgatgggacttcctctagatgacttgtccatagctagaggtatggcaataagtaatatcaatgacaattattatcttaacctgacattgggtattgtaatgcatttgcttactggagccattgcaggtgtaatatttgccattatagtatctacagtgaagaaatttgcaatcataaattttaaaaaaggaattacagaaggagtcatttactcgataatcattttcttagttttgtttattcctactactatgggtatggttctaccaaatctcttcgatataatgaaccaatctaatccaacccaaagcagtctcgaagatcgccaaactgttgaacaaaatctcattccaatctacgggtttggttttattgcacatattgtatttggaataatattagggttagtaacatcattgttagttatcagagctcatatgattcaaaagaattgacgcaaattgtccctctccaaatataaataagtcaaacgagttgcggataagatttaattaaattctcattccgaaaaacttgtaagacgtttgctataagtctcatgaaaaaagactaaaatttcacctagtcttatattttactatgactcaggataaaatgtaaacaatgtggttttgatcatatttcaaacatataccgattggaagaacataattttcataaaaaattttcgatcttgaaagttgtcctagctgtggaaatgtatctaaatgtgacgaatcagattataaatcttaattagtcagagtaagccctgttaatttaaggtaatttttcaaatgcttcccagtatttcatatagattaagaggaattatatcagaacaaaaggacataaatcgtgctcaaaatacaggggaatcttgtcgatatcgtcctgtttggttcaatgacaactcaaattcactctatttcaaatgcttaagttaacagggccccagtatcagatcactaacacataccatctaactttcaatcttactgttttgtatgtcattttttattattgctttcttcttctatcgaattattcactctattctccctttaaggtatcacttatattttttacataatggtattccaatatcgattgtaagtccgtcttatcattatccaatccggtaatttcaaaatctatattgtatattcctgtctccgaaaatatggggccagtcataattataatacctgaagggtcaggaaccatggcattagtaagcacgtcaaatgtcgcacctgtggttacatgagacgaattaacattcttaattacaattgtcaacgggcctgggtgtgaatggaaaaactcggatgctttcaaatcgtgatctttgcttattgacattctataagtaacatgttgaatcggctctccggatttttcgtcgatcaaattcattttcatttgaatatcctgagcgggggtttggacatttggttccgcggcaaaattcattataatatttctgtcgcctagtgatgccataggtggtggtgcgccgtgatgttgtgcactagcgtaattaatcccataacttgacaaaaagaaaatcataataatacatagaacaaaaatcatgtttcttttcataatggtcattatccggtttaatgccacatgtaatttaatttcattaaaggattgtgtatgtctacacacaattatcaattactattcgacatttataaaaggatttttatcttcaagtcattctggtgacaagaatcttattaacaaaccctcagagtataaatctagtcaaaattagggattgggatgagatctaagtctaaatacaaactattatcaaatcatacccggaattattttactacatgagggaaaaaattggatatgaatcatttttattccataaagcaagaaaagacggatatgattacacaatagtctctaatgctaaatttagacatgtaagggaattaggaaaagaccatcattttttagactggggtcaaagtatgaaagttttacgataccatccattattcgtgttaggaagattcatgattgattttataaagaacaaacctgtcggcagagttggaacaatttcaatcctatattactatttgatctataggccaaatgagagtggatacaacagcttttatcaaaaagaactgagattatataagaatgtctcaaagaaatcagttcaaaaataagattaaaaggtccccagtgattttcgctagttacttgtcgacaaaataagttctattaatgtaagaaaacgatatttcataacctaaactgttgccttaaagaagtttaaactagaaaatatgttataaataataacttaccggacggtttaaactataacatcgctacaacggattcacgaggtgggttgactactacattcaagtttatgatatagcaaaaaatcaattaaacataaacaaaatctccatatgcattagcaatggtttcctgtatatctgctaggataacaaaaacaagacatccttacacaacagatgtaaatagtaatttttacgctaattacgtaagagatttattgaatccattcaacaatagtgcctggatcaaattagataaaactaatgaaagagttaacaggatcatattaattataaaataagttggaaaatatgagcctagtcccatacttaacgattaaacaaaaataatcttacattctttttactaaataataatattaaataaacttgaaatgtttttctaaaaatcttgcctgtattagttcaatcagtacaccaaacctttctatttcatttaaaaagtttaattaaattagtatttgctaagaaggttattgaacccctttacctaaacaactcaaaccccattagtcaaagctagaaagtgactgagcccatgttttgctatgactacctgaaaataatatatcgtaaacaataggattgataaatttttttattcttgtatagtataattttggatgactgattaattattcagggtatattatttactagaattaaaaataaatactcacacctttttttgattttaccattatgatatttagttaattaatatgtatacagatttatcctcaacctttgtattataggtctttaaaggcaattctgctggtccgttttgaggtactccattttccaaattaaaagctgacatgtgtagtggacaagttacggtcttttcttcctcgcttaaaaaaccggttgaaagatcagcatacgcatgagtgcatattcgatcagttgcaaaaattttgtctttaatctttgttatcaggattttcatttccccattatcatactccctaagatctccattttttaaggaattctcgtcacagactttaatccaccccatattgattctttattattaaatagccaataaatgttacactttttctttatttatgaaagttgtaaaaaaatgacccaatgttcttgtgtgctaaataacttcgttcatatttctgaatgtttcagccaggtttaaagctgaatgacatgcaattaagatgtttacgttaactgtttcgcttcctgatgaaagttggtgttcaaatttgcttagaaatgtcagatggaataaaggtcgagtggaatgtccccgatgccattgttatgacataaagaaggatggtcagtaccgttcctaccaaaaataccgaggtaaagcctctcttttctgaaagaaaaggtggaagttgtattaacaatgttaaagttttatcaattaagggctctaatgaataaaacaaaacagacaagggcttgatgatgtcttctaattttctctcgtgagtaattattttaggaaatttcaatgaaaatttgaagtcttcaggagttttgtccttccaacctctaaccgtatatcttgaaggtgtgtgataatatgtagaatcaacttcaacaaatttgaagaatttcgagtaataagacaaatagtctttattttccatcttctttggataaaaattacctttccaaccttcataactccagccagagcagcctatatccaaagtcaagttctatttgagtaaattgatcaaaacagtagaaaaactttctttcgaaggattagacttcctatgaaatcagggacggatcactctatttgaacccacgaatgccctgacaaatcataattttctaaaagtgaaactactctaggatgacaaatgttttaataccaaagtattacaaagtcagataaataaaattggtcatctcgtagaaataactatgcaccgcctatttcctcttcatcctcagactttctaatatctacaaaactaacctgtacaccagttgcaatgttcttcaatgcttcactcatgaatctttctgcatcttccctttttatgtcagattccgttgtaaactttgcaaggatattataggttgccatttctactcaatatctctattattcttattacttattatagtcttgccttctttccctaactatgcaaaataccaatacgaaagtggctcccaaaattacctaattctatgtacttcattcataatctcaattccataccactattgcattcttgatttcctaatttgcattttcagaaagatattatgttaattttgtctgttttggttttcaacctattaggttgttttatattctcatcaattaataccgcatcaattttggccctcaagattttgagattctctttatcgattgcaaaaccaattgtatctacttttccattatccatattgacaagtttagcaacaaaatacatgttctcatatcctgattttcctttatgctttttttctaaatcggtaacagtaatctctattttgtctaccatatttcagaaatgaatctcaattttcaaatatatataatttctttatttgttgaaataccttattgcaattctctcgtcattcaagttagaatatgggtcatatttgtttcacacaccgaagccatcatgagaggattctatggataatattatgaatatctttattcttataaaacaaatttggacttcttttcgcccactgagattgtagaacccaaaaacatattgaaaaattgatgtgctattgaaaataattggaaaaacttatctaattgttactgtcactatctccaccacttgatgcattcgtatttataatatcataaaataccaaacatgggctgcaaattctaatgtcattaattatccgcaaaatttttgcccccaatttttctaatcaaatagacttcaaacaatttttgaaaatattgtcaaaatattatttaattagtgttaccatatctatgaaatgatatctagtggaatatatgctttgaccagaatgaataaggttttctaatagacaaagaacatgaatcattaaagtcttctctacaatgatttaagataaaaaaatgcgggtatattatctaatgctttggctgtttacacttttggtctgagccactttcgcagccttcttttgctaccttatttacattgtcacctccatgggcttctttgaattgtttacaatcatcattgtctttctcacaacctgctgatactccaaattgaccatcctcagtttcccaagctttgaactttctgtcagggtctgcagatgctagtcctgagtatggaaccactgtagttaacgtcgctgctcctaacacagttactatggcgaagataaatattgtctctttcatctaaaatcacactaatgagatacaatacaaattcttccttcctggctagaattggaggaaaatccagtcgaagatattatacttggacattgtgagacaatgaagaatacatggtcaaacagctcatcaaaagactctatattatttgtgatttaatggtccaggattataagcagaaagcgttcaaataaacggtacagaaactaattatttatttttgtctcatttttaatatgttttctaatcctcgtccatgcttgctttgtttcataatccataggtcgaatatctgattctttgagttttccatatctctcaaattctcttgcaaatgctgtttgtattctatttagtacctcttgtctatctgttccaactattactgattcagtattattcaatgcaaagtcgtctagaatctcttcagtcgggattttgattattcccaagtgaatatctattggaatcaaatgaaattcatatccatcaatagaatattgttatagaagcacaattattaacaattaattcaaatacctttacaaattaaaatcaaatttcaaaggctcaacatgtgacatcttttctaatgtggttctttcgccttggtctattagtttttttattgtttcggtagagaaatcagcatttttaaacattgttggggattctatttcacttctagtaatccttattacggattttatctctgccccatagctttcaataagattattatactcttcttttattttttttaactcctctatatcgattttggttttatcagtgtatttttcaaatacatcatatagtttttctataagatttatgtgtcgagttaccaacttagataattgtatattatacatatctttatcgcagaataaaatatctttatatcgattaatgacttcaaccatatttgcaggaagacgatctatgttttggggatagttttcaacaatgaaaatattcttgtcgttccttggagatatatatataacatctcgaatcggggtattactaagtagactgccatcccaaccaaatacattttcttccacttttacccaaggaaatccataaattggatagcctgaacttgctagaatatgttttgccttaatctccatttgtttgttatcaaaaacaaggggttttccagtcataacatttactgcggttataacaagtctaataacatcaggattttcctcttgttttgcagcaagatttaattttttataatcgatatatttttcaaggattttctcaagtggagaatgatcatatataaaagtccagtttttgggattaaaataattctctgcatctgtttttgccaaaagaccataactattccaccactgccatcttggaataaacatttttggaataccaaagattgcagcatttacagaggctgataatatttttttaataaaatactttttactgtatgaatcccattcatacatccataaatcaggaataagcttgatggtactttcacttaattcaagccaaaattcctccaaatccttttccggttggtcacttttacttcctgctatgattgcagcatttacagcccctatagaagtaccagcaactatatctactcttactttttgttttactaaagccttaaagacaccacaggcaaaagaccctaaggagccgcctccttgcataacaagaacattttctaattttctagattttttatgtcttggcggacttttttcttctatttcatagctcatatagttacaattaaccttaaagactaaaaattttcttttacatataagcgattaaactatattattaatatggtttaaacataggtattactccgttaggcccctgttaacttaatcattaatcacctcaacattgtgataatctaaaaacaaattcagccatttccgaacatggcttagtttacaatcattttttctacagggaaagtaatcataaaatccttcagttcgattcttgatatactgcatcgtcctttcgataatgcttttcctctttagattatagtcgattttgaattaaatcaccaatccccttaatctaaggtgaataacctcgtagaaatatccttttggtttatcaatacattattgtgattggacataaatatattgagtaaattaatatatttgaaaacttttccaatactacgaaactaaaggtcattccagttagttgagttttatcattataatggctattgttaataataatttctcaatttatgagaataatattatgatagttgtgtatgatgaggtttcttgtttgggttaatgccctttttattctcatcaattaacatagcatcaatcttagcctttaagatcctaaaattgttatcaatagcaaaacccgttgtatctatctttccattatccatgtagacatgtttagcaacagaatacatgttctcatatcctgattttcttttatgctttaaatggttccgtattcaactgaaagtccaaaatctgataatcttaccagtaacacgaatcaaatttaattgctggttccaataataaataataatcttagtcaagtctctctagaagccgatagatatgcagacaattttgaaattgcgaactattatggggagcattgacttacattgtaaagaaaacaaaacatatatggagagtgcagcacttcgtgatcataatgcattttatgattttagtattagcgattactttgggaatacttgtttttatccaatctacagactttgtgactgcccaagagggaaatggaaatgagactggagcagaattcttgtttatccagggtgcacagtctggttcagtatctgaagtaaatgctacaacttctacacttcaattgaatgatgtttcagataagacaatattattttcagatagacctgacagaatagtaacatctactaacacaactgattttattggcaactggagtacagggacaaacaactttgccgtagaccctcccaatgccgtcttgattttagatgatgaagtagaacaaagacaagatttaggcgtaattgaactctataatccacagtatgatgcagaagcaaatacagtaaagtatgacataaccgcggagaatgcaacgacaacgacaacgacatccattaatctaccaggtgagtttggacaatctactttgttgattgactcagagaatcaacaaggaccttataatccgggacaacggtcggatacttcaggcgggctaaccaaatgcatgttcgaaccaaatgcatgttagagaatggtatgtaataggatgcggcgaatctgctaacatccacgaaattaggtaaccatggcaattttgcatgttagcaatgcggtattagatgacttgattgatcatctgttaaaaccttcctatgcaccttgctttaagcttcatcccatctcccttcttgaccagcatttgtaaatcctgaagagcataccgatggatttctctccaccacgagatattacagccgggctaaccaaacctggctttcagaatcaagaacacaatgcggtaccaccaacacactgattctaatactcctaaagcgtattgtgggattgattcagcagcagcagttgctgcaacaaaagccctgaaaatatcgtcaattcaaacaatgtcttacaaaatattcgagtggatctgaataacggaaatggtctatcagcgcaagcaaataataatgaattttctgacaataactgtaatatatcaatcccatatggattatgtttggcttattaatttattgatttttgtaatcataaagtgcaaaatcatgctgtgatgtcactcaatccactttagttctttatgaacaaactctaaaaatctgattatctttatgggaaccgtttttgctattttcatgggattatttgacttggcaggcgtttatacggcagccattggaactaagattatgccagagatccagtgtatttccttacttttggtataatatgtttgacaattggatcaatcgctggcttcctatcagtaaagctacactatcatagataaaaataatggaaaccggattaaagttgatagttagtctcagcgtacagtgtcctcctatactgaatcgtataatgctaagcaatattagatcatctatcaaattgtaatttttttctttttgctcggcttatcatcatctattaatattgcatcgatcttagccctcgtgatcataagattctctctatcgatagcaaatccagtcacatctatctttccatcatccatgtagacatgtctggctatagaaaacatgttctcgtatcccgctttacctttatgctttttttctaaatctgtaacagtgacgtccactttatccaccatatttcagagctgagaatctcaaaacttaaatttatatgatttttatgatggtcgaaacactagattgcaattcgcttactacgtaagttagaatataggtcatatttgtttcacacacaccgaagttatcacgagatgattctacggataaatattttgaatatcatttttcattcaaatcacatttttggacctctttttgagcaccgagactgtatatgataagattagtaaaaccaaaacacattgaaaaattgataaatgctgttagaaataatttgaaaaacttatctaattgttactgtcactatctccgccactgtcactatctccgccactgtcactatctccgccactgtcactatctccgccactgtcactatctccgccactgtcactatctccgccactgtcactatctccgccaccgttgccttcatcactactatcctcgttactactattgtcttggtctgaattgccttcatcgctatcgttgttattttgtttcttttcatctagtattttgtccatttcctcaaccgacaaattcttacttgggtcatcatcctgccagtcaattgagtcatacttgggatcatttcgtgggtcttgaggtttatcttgtccttgtggataggagtaggttgttgtgactgtaacatctacgtaatatttgatcttattaccatctccaccatcatcattaccgttttgatctgttattgcacctgacacgccatcaaagacataggtttgattaggtgctaggtaatagtttgcaactaatccgttgtcaagttccatactaaagtttttggtgtttgatggcagatcaaaatcatcaatcgcctcttcatatgctattgatgatttaacatcgtccaagtcatatccaaatagtggatttgttatggttgaaaaaagtaacaggaaacttataattgcgaccgtagcaaaaaaataattattattgttaacctttctattcattttagtcttgcctaattttggaaaacaaattcattctccttggtattttgttaagagattgttaatatatattttctaatagcaatgactttattgttacctttacactgcgtaatagtaatatatctaagaattattcgatgcaggtgaattcctatttgtaagggaaatcaaactggtggtccagaggtcgctttgaatggtgccactatcgtataccaaatccttccccacctataacaacaactcaatattggtacaactgtaatgatgattcactgaaatgaataagggacaagattaaggatcttaaaagaggaagaagaaattgtaggagtaaaatcagtaataaagaaataatgaagaacacccataacaatcttcaaactaagaaataaagaacatcctaaacattaaaaatgattttcagttttttatctgaaaactctcctaaaaagtgttatttttgtgtttcaatggattatttaccatttatctattatattgactctttttcgttttcgcaccgcaactgaactaatacaattcctttgtatacaatgataaatagaaaatactttctaataactagagatgggcttttttctcctaaaataagattacagagttacaattaaacaaaaattaaggattctaatgtaatctgtgttatttatggccaattataactatcgaacttccagacaaaaaagtattcaggatgagatttagccgatgaaatctaaccttatgtcatatctattactaacagttcgatcttttcataaggaaatcatttttcttttcaatgagcgtaaagtcatatcattttacttaataatataattgattcaactattttacctacgtgcaacaaatccattggaatagtaatagaatctttatattattctagcgttctagtatattagaacctgtttcaaataaccgatattgatagtgggagcaaggtctcattccacagtattctgttttgattaattatttgtttgaccattttctcatccattgtagcaggttgataatggatccgactagttcttgaccctttggagtaagcctatattcaactcgtggagggatctcattaaatgattgcctgtttaagataccacttttttctaactcttttaatcgtattgtgagggtcttactgctgaaacctttcattgactttctaaacgttaagtatcttacagggtttgtagaacaacaaagcggcattaatatttctaacgttcctcttttagtaattatatttctcaattgagatgtttctttcattaaactttcaacatcataaccgtagaaattgcaaggattattatcgtcctcaagtattggtagcttcgatgattttagtattgctttattaggtctgttttctgtgggtttctgtgatttcacttactttactattttactcttaccaatttatatagtttacctggtaaactataggtaatgagtaaacaatcaaatataaaaaacaagattaaagagcaatatggaaaaatagcattggcggatggttcactatcatgttgctcttcttctgcaggatgttgcggtagtagtgagacagtagtatcaccaatagaatcatctgaaacacttgggtacaatctaaacaatttgaattccattccacagtcatctatcttaggtttaggttgtggtaatccatccacctttgctcatcttaaagaaggagatgtagtggtagatctcggttctggggcaggtattgatgtgtttatagctgcaaacatagtcaaagacaaaggtaatgtcatcggaattgatatgacagacggtatgttagtaaaggcaagaaagaacgctgaaataaacggctatcataatgtagagtttagaaagggtgatatcgagcaaaaaatcccagtagatgatagttctgtagatgttgttattagcaattgtgttattaacttgacagaagacaaacttaacacattcaaagaaatacacaggatcttaaagccaaatggaataggaagattagtaatatctgatgtaattacttcaagagagatagaaaaatcgttaatcaacgaggttaattggtgtggatgtgttgatggcgctttaacaaaagagaactacttgaataacataagaaaggctggatttgccaatattgaaatcttagaagaaagaccaggtaacgtagtcgaggattataatgaacatagtgaaaaggaaaccagaaatataacaagcattactgtaaaggctatcaaaaattaaatgtgagaatatgaactttctatacaaaccaaatgagtattcagaggaacccttttttattttttagatatttgtcttatagtttacgtaatttcacttagtttacccagcttctcttaccaacttaaatagtttttctagtaaacctgtatgtatggatgaacaattgcatttaaaagaaaaaattaaagagcaatatggaaaaattgccattgatggcaattccaattcttgttgtatgccctctagtgattgctgcgatacgtcacctgaggttctcatctcaccatttcaatcatctaaggctgttgggtatgattctgacaatttgaagttaattcctgaatcttccgcattaggagtagggtgtggaaatcctactaggtttgcagatattcatgaaggcaatacagtagttgatttaggttcaggagcaggtatcgacgtatttcttgcagcaaatttggtgaaagaaagtggaaaggtcattggaatcgatatgacagaaaatatgctcaataaagcaacagataacgctaaaaaacataggtatacaaatgttgaattcagacaaggagatattgagcaaagaatacctgttgaagataattctgttgacgtagttattagcaactgtgttattaatctgacaacaaacaaagaaaatacatttagagaaatttaccgaattcttaaatcagaaggaaaagggaaaatggttatatcagaatctaattacgtctaaggaaatagatctaaattctgttaatacagagagttggtgcagttgtattgatggtgccatgacaaaagaaaactacattgacagtattaaaaaagctggatttactgatgttgagttactagatgaaaaactatacctggaactagaaacagacgaagaaggccaagaaaaaagacaaatcaccagtatttccattaaggctgtaaaagagtaaaaaaataagagaataagtgattaatatgaaattttcatttggtaaacgagatcattacaatgtaacgaaaactgttctctttgtttgcattcaaaatgctggaagaagccagatggcggagggtttctttagaaagtatgctccaaaagcattcgaaactattagtgcaggtacagttcctacttctcaaattaatccgattgcagtagatgttatgaaagaggttggaatagacatcagcagtcaaaagcctaaagatttgacagaagatatgatgcgaaatgcaacaaccataatcaatatgggttgtatggacgataaatactgtcctgcattatttataccaaaagttatagactggggtattgaagatccaaaagacaagccgatagagaaagtgagacaaataagagatgaaattgaaaaaagagtattggaaataattgactctgccagagacaataaaattccaatttaagataattgcactttatgtcgttcagttaagtgaatccaagtaactcctagtaaataatcatgtcaaaggaatctacttttgaatctgtagttagcaagctatctactaatcaaaaaaggtttatcgcagaactggtgggaacgtttgtcgttgttgttttagctacaggttcggtagttattaatgcaaagttaaatggtattcttggactaccatttgttgcatttgctccttttgtgggcgttgtaataggtgtatatctttttggaaaaatctctatggcacattttaatcctgctgtatctgtagggtttttgataacaaagcatatcacaagaacgctcatcgctttgtatctctcggctgaagttatcggtgcttttctagcaagtctttttgtaagtattatgataggcaaagaggcaaacataggagctaatgcacctaattattcataccctttacctttaatatttggaattgaagttttagcatcagctcttttaatggcggtaatactcactgttgtttatacaaaaggtttgaaaggattcggcggtatcgctattggaggtattgttggactagatattttatttttggcttttatatctggtgcatctatgaatcctgctcgttcactagcccctgctgtgttatcaggtgtattgacagatctatggctatactggactgcaacatttattggtacatcagcgatagcattgctatatagaaagaaaatagttggtcgttaaattagattaattcaaataagtaatttcaaacttagatcttcttttcagatgacatataattttaataaatatattaataccgtctatagaaacaataattcgaattttaaaagttctactttattcagaaacttggtcattcaatgctgttacgaattaagagaataaagaaactaaagaatatttgtgtttgtatagatcttgtctccttttagtctgttccccaaggattatcaatgacaaaccgccaagttccatcagcttgttgacgcaaaacatcggcagatttggctgatatgttaacagggttgccatcaggtcctgttccattaaatgaccattcagttgttaccagagcaagatcgcttgcttgaagcactctctttacctttagctctaacttaccctttagatcaatgaaaccccgaagactttgactaatagatgctgggttcttagcaagctgtcctggttgggttgcgaaacatgcatctgtttcatagagggtcatcaaggactcgagatttcctgtgtttatacctataacgactgaatttaggacttcttctggtgttgttgctttattgatattaaagttgggtattagtttactcattacctatagtttaccagataaactatataaattggtaagagtaaaatagtaaagtaatagtaaaagaggaaactacatgaatgatgtttcaaaccccattttttatatttaaacacattcatgacgtatactaaaagaaaatatttgatcccttagtttagtatatttaagattatgaccttcatctgaaacaccattattaaaatttttacctgtggtataattttgggtttaacctagtgtgtattaaaagaaaaccattgacaagtcggctctgttcacttaagtatttgactaacagtaatctttatcataatgtatgttcactgtaatttcctaggaaaacatctctgaattatacgaataaattattgccaaatttattggaaacattttgagagcactttagatggtagaaattatagaataatttccttaaatgaacaaatccgactagaaggattaaattaattaaagagtagattcaaaaaactactaattattgatattcattaattataaactaaagtattgtcttgacgtctactaaaagagtatcttaaggcctcaaaggataaaatcccatacacgacgctttttaaagtattgtaaacactcaagattgtgagaggatatcaaaaacttacaatagtaacagcagcattaggattagtaatcccttttatcggacttttcttgtatttctttatcaatagtgtcataggaattcctgttctaggcctatttttaggagaggctctacttattgccattgcaatcatagcaataaatattggtgcaatcatagcagcttttaaagtaaaaaacacaaaaatcgttggtataactttaatcgcttgtggaatattgctatttttggttatccagttttttgccattccaagtctggtattatatgtaatagcaggagttcttgcgttaagggaaaaaaattcaacaaatgtaaaggcaaccttttcctgtgaaacatgcggacaaacttttgactcaatacagggtttaaaggaacattctagcatcacacactataaataattactaaacctttatagccatagcctataggaagactcttctattattgaatttatcctcttggcaacacaatatgacatgcgccgttcctaaaggacggcgctaaattatagctacatgaaaataccgctggtcaaaaagatctattagattcgattttacattttttttatactacgtatctaaaggctgattcagtaaagcctactttcgtctttatagagtaatcattgattgcttccatctagataatacctttcaacaatttgatattagcagattcaaatttacatgttaacatcagttagtggaaataccaaagtagaacgaactaaatttacaatgggaatatagatagactgactattgtctccaatggcatttgtaaatttgtaatttgatgtcattttatttaattcaataaactttgtagaaggtttttcttccaagataaaatagtgagcaacgactcctccaaccatccctgtgtggacaaataagatttctttatctttatatttaatagaataaagcatcggtgttatagccataaaagactgcgacgtgtaaagtactacatttagtaaatcccttagattttcatactggaggtaagtagtaaaccattcgccttgagacacacttcaattaaaatgtgttatatttcttaaatatttcttaaatatctatttggtttgaattgaccatattttcattgatataattaaaggtcccattagttgtgatagtagttacaacgactctaataattactctgtccatagagcttatctaccatatttcatttttataagaaatggcaacaaaataataagtttggatagtccattattaatcgtaaacaaatatttgttaaaatttcgacattaaaactaacatacggatacagatcttatatagttggtgacatttttagttaccatgtgattctgaataaggattatagtactcgccgccttaaggcggtgcagtgatcaatgtctatctgccaattacccactacgtcggctgctttttcaataatgtttttatctggattctatttaatctctttttcattcggtgtccacacagaacatataccatgcggtgctatttcgttcgacaaatttccattaatatcctgtccttcgtcagttacgatcgcacaatgatttggctttataaaatatatgcagttataacagaaatagcccgtatgtgtatcggaatttttaaaattgatcaactccatatatcctgaacgagcctttgttagtttattcagtttagttgcgtcttgcggtattttttgcgcagatgtaaaattagaagatacactcatgagcataaatgtgaaacataccttaaataggctatatttaataagctaaaatacgattctcgtcatcgatattgataatagcttctatgtaacttctaaatcctctttttatcgatgataaataaaaatgagatttcaagtaatttactacttctgtcagttgctagtatgttagccttatcggggcttatttattatacatcctcaagtgaagtattcgcccaagcaaatccttttagtgataacaatactgctggcgtggatgtacagccaaatatcaatgctgaaaacatttttaataccaaaacaatgactttgggtaacaacataaaaaatcttgtcatccttattccaaatgatggtcatcatgctgctggcgaagataacgaatccagatttttggatcaatactttgtaacggaaagtgctatagtcaacacgggaactacggttcaatggtttagtggtgatacaggtcacgaacgcactatagacgtaaaggatacagacggaagcacatcattatttaatactggagaaatcgttgatagtcaagcatcaacccccctttacctttagcaaacctggtgtgttcaactatgaagcagaaggcgacccaggcgtaacaatgactggttcggtcactgtaggcgatatccaatcaccagtaacatcatctaggtcatccacctcaaattcaagttcaggtagtattaacaccgtaggaattttaatggttccaacacaagatatagatgactgtattcaacaaataactagtgcaggaattgcagtcgacaatacttttgactttaaagacttgagaagcggacaaaagagtacaggtgatacacaaacattaattgtatggaccacagctggcaaggatttaagccaaacattttcattcttaagtgatctttctgcagatttgccgtatagttgacaaactatactctatcttatttgacattaacatccaagttggatttaaaactaactcaggattatcatcctgaaaatttttattagtatatcaggaatggtaacaactaggagtaaaattaccatattaagtattaaataataaacgcatcgtatgtgcatctaaagtatttgaaataatataattcgttatttttaatcatttatcctatcgaaattcttaaagcattagattgacaattattacatctagaaaagtatttttcaactcttccagatgtaaacaccaagcctaaatgatgcattctttattaaggcttatacgctaaaaacattatagttaataagatagaaggttttgaataacaatacaggcaatcttcttccgcagtctatatcatatggagaatcagcaataactaccacatcaatcctcggattggtttttaccgccttaaaacaattttgtcttattttgcagaatcaaaaattgatatgcagaatcgggaagtatactgagaaaaattctaaaagtgatagtgatatattacactttatcaattgagcactcgcaaagttcccgttctattaatattgttgcgacctcacaattcaaacttaacatcaatatatctgatttatgagtagactaactttcaaatagtgatagttaagatgtgtcgtcgccaatttattcacaaaatcattagcaatatttttgacattgttaacagtaacaatactgtcattaatcacttcaaataaaaattgtttattcaaactaatcttgaatatatcatacgtttttcatattgtcaaagttaaaatacaacttaaaaatcgaagttaaatactacaatcttctatagaaattgatgaattcaaaaacattaacaataggtatcatagcaatttctgcccttatgctagcagcagtaagtgggtcagtatctgaacaatcttttgcaaagtcagtaagtgaatgtacaaaccatggtggccacaattccgagggatcgtgttcaggatctgataataacaagaaatgtgaagaaacccacgctggaaatagctttaactctaaggtaaagagctcagactcagattgttaatttagattaacaacaaaccaatttttttccttaatgtatcaactcatcagaaaaaatttctcgattctaattgtaatctagttaaataaactttgaagaaaattctataaaatgacaaggccctataccatgtagtccaagaccttgagggacgaaaatgtcgtcaggttaagctcacctaacatacttgaaattattatggtactttttttgtagagggtttctattatcagttatagttcgtagtataatgtccctattcggccaatgaatcagtgacactaatgactcaaataaggcaaatataggatccctgtctgatcttatggaaaaggggcggcgaccccaaattaaacataacaaaatcagaacaatggactacatatactaaccctcaattacaatttcaaatggattattcagaaaaagattaacttacatattgctgtggaccgttctgcgatttaggtttccttcagtccagatctatatttcagtttgagaacaaacataatgtttctagctggtaaagatagtggatcagtaaagtagtggtatttcagattgaaagtgtcgtggtgatttagatccgtcgagataaatggtatcaaaggtactactttgattgtttacacttttgtcctgagtcactttcgcagaattcctttgctgccttgtttatattgtctccaaaaccttcgttaaaatttttacatcctccggtgtcttttgtacatcctatagttctttgtacacttccatcctcactttcataagttttggactttaagtcacggtccgcagacacttgttttagcaatggaacaactgcaagacctattgttgttagaattacaatagttatcgccaaaactgtaaatgatttgttattcattttaatgatcattaattatagatatcaatagccggtaccgtcgccttcaccgccagcgcatgtgggatcacagatcttcattccttcttttggctctgttatgttaacaagtaatcttactacctctctaggagtaaagaattcaccacctctcttcttcgtttggtctgcaaactcttccaaaagatattcataagcatctccaaagatatcctccttttctaaatctccatttcgaagtcttggagaattaaaatgtgagattaatgctctgagtttatcatcagggtattttctatttatcattgtatacaaagggacaaaaatactaataagcaaatcatattaagataatatcttgacagaaaagcattttacaaaagatgatgccagaagaataggcgagtctttaggtattggttggactaggtttgacgtagagcaatttagaatggggttagacgtagaattagaacacggaagtcacgaattatcaacgaatgtaacaaatgatgatgaaacaacaactggaaagattgcactagcacatctaaatgaatttcctgattattatacgcgattgcaaaaaatggaaagtcaagcaaaagaagagcagtcatagaaccaaataatgttaaaattttatttcaaaatagactatctgataatatagtaattcttcatgttttttatgagacatttatactagttttctatacttttcagataaaaaagatattgaataaataatttttttataaaaaagcgttacggctaaacatttcaaagaatatgtagttattaaaccgacagacaaaagccgaattttattatcgtggctcactactgttatatttaataattgaacccaaaattatagtcaaacttgacatgggcccaagggggtttgaacccctgacctaccggttatgagccggtcgctctaccaggctaagctatgggcccattcattttagtttaaaaatgaaatgagtgtataaaggttttgtttataaatatctaaacctcaatattttgttccacatatttgctgtaaaccgaatctaataaattattctgggcggtcaaagatatttttacagcatttagtatttccttgtgtttatcttctgagcactcgtttagtatattctcccaaactttggcatgatagatatcaacttctttatggatagtaaaatagcgatgagaatcatcgtcaactttattataaaattctttcagccccttgctcttcgtttcgctaatctgtggtaattctttttcaaaagcatatagacttgcaactccttcttcaaaagaggctttagagattgttaataagctgtctacagcctttctcgtcgatggttctccagaatagtcttttaaatcttcagattttacatttaatgacgatgcaaatctaatccatggttcaatatggtctctttcttcagccaaattacttctgattatattatcatacttttcactcttgttgttgatgagtgtattctcaacaagatgtggcacatttttcaccaattgataatattcttttgaatatccagctaaatgatctagagtaagtttaccttcttgccacatctggtaaaacttatgctttaacaaactacttttttcaatctcagcattaatttgatccattaaaagagtcatacaatctaattctgacatttttccataataaacattatgccttcgttagcgtgtgtattacatttaatgagatgatagttaccttctgcaatgagtttactaaggccatcgctaacttttgtgctggaatgctaatgttaacccccactggattctcaagtattatacgaatagggggtaccgttggatctccttgtcttaaacgtctagacttcgaattagaaatgattattctttggcttccattaccttgctctatattcatctccggagctacaggagtatttgtactcgaacccttgctttgagtattagtatctgaaggataactaacgccattttgtccaattgaggaattctgagtttgattctaattgtgaaacgtttcctccaactttagagttattactagacatagaatttcacttataaaagttagaaaggaatggagcagaaagctatgttagattaccgtactgattgaactagaaatgaggataggcaatggtctttacaaaagtgtatggagcagcttattcctcattcctaggaaatgacgttcattatgctccttggatggttgattgagcaaatagatatgaataaaatagtatttaacgataataataaaagaaccatagatttggaacttatcaataatggttttaagaatgagcaaatgtattaaatattttgtctgtttttccctttttgggttttgtcgattcggatctagattatcggttgtatgatatgtatgatcatctaccaaaacaacgttaatccaagttttagttgtcttgatattattattttaaacctgaaaccgatggtttctataataccatcatgttatggatacttgagtcactctgagtgactcggtataataacaaaaaagtgaattgttaattactgatcggaagtttgaatggcccccgacatgaatatttatgataaataagcacacttgaaaagagacaataaattttacaggctaaaccatcatttcccaatatctaaataatcaaaacggtcatatgtgatttcagaatctatttgtagcaattaaacttgcaacaagtttaatagcctgtattcttcggcttctaaaataattcttaaaggcattttataaatcaaacatttattgtatttaagtggaataccaacatcaatgatgaatttttgaacttacaaaaaataattgctatagtattgattgcattaactaccttaaagcccccatcgtgaaaaatttataggttaaaatacaaatattcacatttaacacattgaatttttttgggtttgttatatccaaaaggctgcaatactgtacatttagctaactcacaatcttgacacaacacacgacacccgaacttatccttaattcgattattttttttcagagaggttatagtaagatatcttttgtcatcattcaatgcttcttccaagaagcgtatgctattttcatcatattttgacacgacaatatcagaatctatttgtggaggttctagtctcttgctcaatatttagatatgagagtacatatacttagattttccttatcagtgtaaaatccagcatggaaagaattaattattcacgatgggctcaatctttcgataagtatagtagagaaaacaaactcgatagtaaaatctacaaataaaaaggattttataatatctataaaatactcaaattgaagctccggtggtgtagtagcaataaaagctgcacaatccggtcaagcattgcggcctttcgagtcgcagatcccgggttcaaatcccggccggagcatcggtgattttgagttctgagaccattttgaggagatttaagagtttttcattgagacataatctttatacagtttttcatttacagtatacgttttttatcaaagtggatattacagtttgcgcatacatatcctatctttttgaaggctcttgactaccagagcgggtataggttgaattgaggcctttattacaaaaagtatatctggtcatctatggcaattaattcgtcttctggatctttaaagattttgttatttgggattacgattcaaacgccgcaatgcttgaccggattgtgcagcttttattgctactacaccaccggagattcatcaaacacccgtccaaatagacctatcaagctaaaccccagttgtagccactttgctatcaagaactagagtcattggattttgaactgctagccgacatattgtaacaaaacaacatgttgcagaatgtttctgtttgtttcggtgtcattatagagaggacgacaccacgtagaatatgatgaattggggacagacatcaacagggagaaaagtcagacatcggatgaaagttcttttgcaaaatctaacctctttctgatcaggcatcttcactttctttcataggattgagaaacttgtttttaccttgaagatatagaattcagagtttgataacatgatgacagagattctcgaagtactaatgaataaactttttcgattaaaatggggtccgaggttagaaagagatgtatcaatttttaatagtatccttcccaacagacacatgttgctagtgttttataaataaatttctctaatagtatatagatggaaaatacctctgaagacatcaagcgtctgacccacagatttgtcaagattttaattgaaagtacaggtagtgaattgaacgtgccagtaaaatttgttgatatctataataatgcttgtagaagtcgaggaggcagtaatgacaaatacgaatcaaccacagagatgagacagcatgttcgagataacttgatgaaaaatggttacatctttgtagacacaaaagacgttgactctatcaatctaactcaaaaggccatagatgaatactcaggttattagaagactagaaagacgaaatgaatttgtatcattgttatgtatatatgcattattagatattacgaagacacaaaagacactacaagaaaaactcgatgaacttgaaatattttgcgatactaaaggatatacttcatgagagatacagggtgagggtcaggcattaaagatattaatagataaaccagattcttacaaataacgagatttacatttttcctttttttaggttaacgacttaatgcattctgtaatttgaccatatgaatatgtgaattgcctaattcctcactacgcatagttacactgcgtaatggttaaatcatatgattatcttatcttatccaatgggtcgaagcattccttcgtttagacacttaattgaactcgagcggttgaattggtccgaatttaggaaagggctaccatccaaggatgagaaagaaacgtttaatagcatattcgaaaacgctaagttgtatacacaatatctatctaatgccaacagaccaattcctatagagcctattatgaggggcgctttgttccataactataaaacgcttttgaagttgtgtaaagaggaggataatgtcactgaagaatccatagaacagaaattggttgtattggaaagagagaaaccattagttaaagcgttgtttgataatacttgcgaaaggtggcgcggtctgctatacgcctttcataaagatgatagagaacagttgttaaaaatgttagttgattgttgttgtggtctggacgatggggcgacccagatgttaatcgacaaagtttcagagtctaccatttctgttctgttctttatctgtcttatcttgcagaatcaaaactgataaacggaattaaaaagtccacagtgaaagccaccaaaactgatgttaatatgttagactttatcgattaactctaactgagggttcaaggtttatgacattgttgcggccacatctcgaactctacgtcaatatttctaatttgtcaacatgaaaatgttaaaagttatggtaaagacgtgccgtcgccaaaacttttgaaatgtttatctcaacaataagatatcgcaatcaagcaaactagatcgttttacatctatagataatgcatggtttataatggatttcataaccatttacaggctttaaattagtgtagacactatgtgagcaattttcttatagttattgagaaaggtagaaaaaccctgtaagaagtttccgagtcaattaaagcattcttatgagtattaaaaatggcgggccacaaattggtacttaccgactgataaaagataaaatgtgctatagctatatcgcttaacacgaaccccagtatatcatcttatataaatataaagaagggatgacagggcttttggatttaccaatgtttattagggtaaaaaacccattatagaaattacaatgcaatctctagatgattttgccaaatccgatctagataaattggaaaggttggcagacaactttgaatgggtacataaacaacacgacaatcttaaggaaaaatatgataatcaatacgttgccattaaggataaaaggatagtagatacggataacgaccatgatagattagtaaatagaatgaatattacaaactatgatgagtctatcgcgatagaatatatctacaattaaatactatttctaaaattacggagtacgagatatactaacattctttcctcatgcggaatttttgttagatacggaatattcattcatgcgttctgaccatctcaccctttcaagttcggtatttttttgattgtcttaattacacccaagatcattatcctttttatatataacactggcaaagatatcaaaattcactttgttaaccttatggacgtaacatgttcaggtatagacattcttttccgttgtatcttctatgttactattagacatccacatatgaacaagcccactaattcatgattctacaacctcgtaatatagccgtcgccaaaacttttgatacttaacggtcaaatacaaatcacttttcttatcccaaaaagttcctcaatttgagaaatatattaagagataaatatttgacgaatgttgaaactgactagcgttgaagaatactgttgaaattgggctggcaaaaaaaagaggaatatatatgcaagaacttctccaaatggaacaacatttcttaccaccgatcccaatggatctgatatgaatactttaaactttctacccctctttgacaaaccattattaagacggctgatagaaactgttcgttgagcaagatccctttagatttgtcaatatctaattaaatataaattctttaccctagcttgttgtcatggttagtaaccgacaactttgtttcagattcattctggccaaccggtagggtaaacatgttcttcaggatagatattgttggtagagcagagtttaattatatgggtccccagatcactcaaacgtattggctttagcaatacttcattgattttgccctctccgaattcatcctcaagcagcatgtctttcatataatattccgataatataagaataggaaccttggaattgattgttctaatcctctttgcaagttccagaccattcataaacggtaaatcccaatctaaaagtaccagtgcatatctaccttggttttgttcataatgctccaaagctgttaacggattagcgaaaatgatcgaatcaatttcgaatcttgttaaatacaatttgtaaatatgtgacagatctcgttcatcttcaactatcataatagacaatggcggcgacattctgtcgaatattactattaaggtttataactatcgttgttttctcgtgacatactagttgatcacaccttccgcaaaagcttcttttcgacaaaatagataatacaatcttgtagcattccaacaaattctaaatcagtagtagattctactactatcctagattaatcatggtttataatggcatttaaacccacttataggtttagaatgctaggctgactttatttaataatagtgacctggatttttggctccgtaagaagatatctgcaaattttgtgattctttcattaaactcctttctagttcagatatgaaggtaggttaaacttttcttaatcaattctaatatgatcagatatgtcataaatagttcaaatacttgttaaaatttgaacaaatttcaactctttggattgttatagctaagatatgtcaatagttttatgtaacaaagaactagaagataaataggtatgtaaagtgaatattaacatatcagaatccgatcgagattttgcaaaatatgaaaagttgaaggataattttgattggttttattctaattatgatgaattgaaaagagattatagcaatcggtatgttgcagtcaaaggaaaaagaccaatagataacgattgcgatctagaacgattggtaaagagattgaacatatgcaactgtgaagaatcaattgcaatcgaatatgtatgtaagctgacttaatatacttataatgcagacaattctctgttttgatgaataaacttctttcaatgacaataatggctatagtaacaactggtcttttgtcagtatctgcaataggattgttacaacctgaaagtgcagtttcagataatgctaacctggtaggacaaatagtaagtaaagatggatctagtagtaaccaaggttatatgcaatcttgcaaacaatccagttcagctaacgaatgtgcaaccggaccaaccaataacggagaatatacatctaacttagctaaatccactaacggccccaattaatctaagttaaaaaaaaccaataaaacccttttttatggaaactatacccatacataccttaaaattatctaaaaacaagataaaacttgaacattttctggcttttaatatttcattttcggtctttcgttctcatttttgggatagtaaatacaatttgaactcgggaacgttcccctttctaatctcaattcataaaacaggttcctacaaacgctatagtcttggatactttcctagcagacggcgaaataatctacattcaaccccgctcttagctgattggtttccggtacaaacaaagcagcaaaggaagaattagcagccaaagtataatctgcaataatctaagcacatgaaaacaacaaaaactccaatctgttttagatgtagaaaaataaaaatctaaaacttgaaatatttttttatagagatttgcctagattttcaaaagtttttactatcaggctgtccttgtcaccatacatgaattcaaccctttgcactcccttgataccgtgaaatactgcatattcagatacaaattgttcacaaccttgtctaatttcctgaaatgaggacccggttccaacaaactctaaataaatatcacttcttctcgttactgctactttaacctttacagttagagttatttcaaatgccatattttttatcctgagagaagagattagaggcgaaagtatttgtttgtttgtttgtttatattagaacctactaggaagggttggtatataaccttgtcttgatgaattctttccagtccatactttgttttggtagtgcttcacccaacttgattttcgaaagcggttgatcgatatatgacggtagagccacaatttttgatatcttttaattaggaaacggatggaatgctccaggctttgtttacaaggtcaacatattcacaaggattctgttcggtatctctaacaatttttttgtttttactttttatccatttggttcttcacgattccccccaattgctgctcctacggcggataatctacctatgattgcgtttgttgtttgacctgctatttgttctatttgttctgttgttgcgataatgttgtctgttggggttggttttaacagtgatgggtagtaaagttcttattattaaaacaccgcccaaactttcaactaaatcaattgagaaatcgatgggcatctagatatagcaatattagaccttacgtctctaaatacgcagtaaatcttcaaatagatattcggtttgctgaggaatgaaaaatatattacattgacattatgagttagaccgccactacgtaactagtcataatatcatatatataattagtaacacctttacctcaaaagtaataacaaacactttgtttcttcgtttcaatttccattttgagctaacatttgaaccttctcatgtagactttaaaatatttctttaacccttatgaaacaagatttcagattagcaatacaatttttgtccatgtatggctaatttttcgaaactttcacaggtcaaagggttgatcacttcgcaaattcattgcagtcacgatttcactttgttccttgagagactaataagagatggattaattacatcgtctccaaaactacattagttgctagagaagaattcttagccttcctaaccttggaagtgactaaatgtctaaaaactaatagagattaattagatcatttctttctctactctaatatgtctggctagagtaacctttagttcaatcaactctggagtagtaaacatagatagtaaaacatgattgtccattggttctttattgatctgaatctccttagctatcctattgtttctaccggatccttctctctttataatggacaactgaatcccaagttgtgcaaaattgaaacttccgaaaggtagttttgaagtaaggtatttacaatcttcagctaatctaatccttgactccctttcagatatcatattaaaagtcattatatccttaagtataatttggtttgaaatgtttctttaatagtaattttaaatgaattttttaaggtacaaagacattcctcaattatagcccatatgcccactaactgacaatttaataggggagaaattgttaagtcatgagatacaaggttttggtcttgtttttaatacgttttttatagtaggtattatctacttctcaagcatatcagaattatgtcgtttttttatttctgcgaatctctcaaacgattagtatagatgcctcatctccaaaacttttgtaaggtaatttggagattgtatctagtttgcagttattttgtattccaaaaatttgcaaaacctctatcatttagtaaccatatgtcatgatgtacttttaaacaaatttcgactttacaattttgtcccttggaaaaagatatggactctattgtccatgtagattaagaccagtattctcactggaggacagatccccagaattacaagaatctatgatagtagcatttggtggggcataacaatatgaaccttgcatagagctttgggaactagttatagatcgatcttcaccactatcactgctactaacatcgaattccacataggcatacgatatgttagtagaaataatggatattgagatcgctataaagatgactagtatggatatgctaatttgtttctttatgtgaattattctcattaatgatattattcctgtatcctatatcgagattatgttacattaaactgaatttgtcttacattaatttggtaccgaaagcaggcagataattaatgtagttttatctatttgcaaattcagcatcaatgtcatatacaaaacatatatttatgaatattgtcttaggcccttttgtcatgatttaggaaaaggcataaatccacgcactttggtaatatttttcattcactcgtgagatctaacagatatataatcttctaggaagcagcatagaagaccggcttagaaatattgttttttgccataaaagaaccacgacacccgatcatattgaaaattgagtatgattaatgaaatatacactccattcaactccctgcccgtcattttcaatcctgaagacagaacttaagatgaaatttaactatttttgtatctattcaacaacagttccattaattgctgtagtggggttcgcagaagagtcactaattaaaacagaatcggtattcgattgatttagagaagcatcagcaattggctgaccgtatgtgtcagtttgtattgaataattatctaatgatgacagtagcaatagtacaagtattaaagtaggaatcatagtcaaagaacaaaaagtctttaatttcatattattgatgccactttatcctttaaaaatttattgtgggaattcagtctctaacctcaaaattaagagttcttaaataattagagatcaaataggtagaatgtggactaatgaaattacaaatctaatcaactaagaattatccaaatcgaaggattttatgcgctacatttcatactggttgtgatttcaaaatcaaaatttgtaattatctttcaattccgttcgagttttgatcttaaattagtttgttggttaagcgctaggattttccatattcttcgaacgaaaccagttcgtgcattgtcaacctgtttttctttttctttttgccatcgattttcttttttggatatccaaatcccactacgatcacaggtttataatcaatgggtatagcgaaatcctttcgtatccgatcttcttctatccctgtaaatagagcggaaccgacaccgtagttccaggcagcaagctgcatattctgcaccactttgccagcatcaattagatgaaagcgaaaataaggattagttagaataattattgcgaaattagcctcggaaatccatttaccgctagtgctatcattagataatttcatcagattgtttttattctgtatgactataaacctccaaggttgggtatttagagaactaccagtaagcctagctgattctaaaatttttagccttatttctgatgagacactattttgatcattaaattctctaacctcgagtttagttactatacaatcataagcatccatgttataccatctatgattgatcatattaatcatttcagataattctatagatgaaattttatgaaatatttacattcaattaatgtaaagaagaatcgaaggtcttcaaataagggtaattaaccatacgttattttttatcacatttcggtatgatcaaagtaccaaattcgatttactaaggaatttgaaaatcagctgatgataaaacggctgtttggatccaaataataaataaattatccttattaatcaaaaactatctagttttttgtcaaagaacttaaaaattatttctggttttgactaatgcttacggaaaaaagacttgctccaagcagtattggattcaaataatcattcattcctgctctaccatcaaggattattcgtttaaatcaaaagatgaagaatgaaataaatcaattatgaaactcgacatgaaaaagtccacctctagtgctgggcattgagttaaatagaaagccagaagtgtatacataatgattcaaaactgaatcaagcgacgactggactggactgtacttgactctattggctctgtagataatgaggatttacccattcaataaagctggcatagtttaaggagcgagcatcctcaagataattggaaaggatcttgataaaattaaatccattgatgagatcgaaactcaacacaaggtcgtgcaatttacagtctacaacactacgtgcatattgtagtggtgataattttccagaatattcacagtagttatatagtctgccacctccaatcatccttttcacattcattttcattgcaatatcctttctcccttgatacaatttgtgacctattcctctatgtctaactcgaggatgagtggatatatcggccccataaagagtatcaccagttgggaaatgggtcgtaagcattccaccccccgtaatactcttccaagtgtggtctacgtagataggatttaactgaacaattagactggtagccgatcccacaatcttattttcaagctcagcaacaatctgaccctctgggaatatattcagatggctccttaattcatcaggatgccaaatattacccatctttgctagatcagcaaaagattcttcctgcaactttacgatttccggaatatcatctaacgtggtgggcctaattaaaactgaatccgaatcaagtacataaaatgaactcatttttgctttatagaactacactaaagatttaaattttttttatgcttggagggttattggattggtgacgcactaactatgaatttcgcaccagtcagcacgaaatggatattagattattaaattctgagagcttttggtatttgagaaataacaagtagaaagtgcatcagcacctaatttcggtattcctatagaatcaaattcaaattcaaattcaaattcaaattcactaaaaagctggaaactcggtaacttagaaactttctttcatgcttgaatgaatagaatgttatttcacaacaattagaattacagtaattgcctagctaaaagcctaaaagtaccatgccaaataacctagttatcccaccttccaattggattactcaaaatatgttgtaacgaattcagcagcgacgtaaatttttaatcatttgaataattgcacctctaatgatctcccaataatatcgtataatattagagtggcttagggtaaccttgtgatattattagtttagacttttgtaaagaactcacttaattcgactatcaagtcctaacgaatagaatgtagatgaaaaaataaggctatttcaaaggaaaaccaatttattatgctaattaatattcaccaaataattaccttttcacataaatgcgatataaattagattgaaaaaattaatcgatatcatttagaagtaggatgtggaagctcaataaaaatagagaaacgcctttttccaaaatctaattaacccaactattcttgatttaattataaaagtagtacggattcttttaagagcctggataataaaattacgataaaaacaagcattaataagttcagagtaaattacttatgtaggctaggaataattattgaatgagagagactttcaggtaaatccgtttgttgaaaggtttaatgaatatattaataaaattaatgaatccttatcgagagaaatagagtcttattcctggtcagaattttatctgccacttaaatatgcatgccagggtggtaaacgaattagacctttgattttaaatctagcagccgaaactattaagaatgacaatattagctccctaaactcaaaatctagggaaaatatatttgctgtttcttcagcaatcgaattactacacacagaatcagttatacatgatgatattattgattctgacaatattaggagaggcctaccttctttccatgtaaaatatggatataatgcaagtattctcacagcggatttcattttaggtatcatattaaatataagtgccaaaactaataacaatcgcgttactcaagagctatctacagcatcaattaaaatgagcgaaggtgaaatgcttgagttacgactagttaagaaccataagatatctcaagaggaatatatcactgttatcgaaaataaaacggcatcattgtttgaggcttcagctaaaatcggtgcaattttggcaaatgggaacgaagatcaaatcaatgctcttgcaaatttcggacgccttctaggcattgcttatcagatccatgatgatttgattgattataacaatgaagaaagattatttaatatacttgtcaaacaaaatgacgaggacaatatatttatcgaaataatggagaacacatatcttaattattcacaccttgccaagaaagaactcgacggcatagaaagtaatcatcattccaaaaaaatacttcaggatttgaccaatcttggttcattttcttaacaagcctactaacactttagacttagtaacatgattattcggttattaaaaactcaccaaagtaaataacaagagtcagtttttatgtatttatcgaaaagcagtttgcttatatttcaatactaattaatagttgcgttagtaatcaagcccgcccgaattcacttaaactcgattagaatattcgaccggaacactaacaattattcaagaattctaggtaattaatcataatataatgagtttagatctaaatagtatcgaatctctttagattgttacatgaaaatgaaaattcttcacttttgaagatggaacttattttattttaaaacttttcttgcaaaacctaggtatgtcgtatgacctatcattctcatcgatggacgtgttttcccttctctggcttctatttttcggagaaatgtctctacacagtccgaatcgataaaaccaccgtgaaagaaatgagttgccaagttttccaattgattcattgtgggacatatacaaaccactgaggcaccgctcttcattgaaggataaacaacatccaagtaattccaaggatcaccaagatcgattatgaccaaatctacatcccggatttgatctatttttgtggggtcatatattgcctgagttacgtaaggttccataccggatttttccagattcttctttgctatggacataaaatcctcattaacatcaaatgtataaatgtgaccttcaggcataacaatacttgcaagaaatgtagatagtgcagcactcccagtgccaatttctaatactttagagccatttctcagtcctgtccttgcagcaatatatccgtagtcctttggatatactatttgtgtggttctctgagacttcattacgaaatcatatgtattcgggggcaaaagataaatttttttatctttattcgtcatgatgtgcgaaccatattccaaaccaatcgtagaacctgcgtcaataattccaaggtgagtatgtaatttcttttcattttcaatccgtatgagccatttcttatcactgttaaaaaaaaataagacaaaagagccgtctgatattatcaaggatttcttttgtttatgtagggttaaatatatattattttaagactgcaccaaaggttaatctaatcatttccttctaataacattaatgaaaattgttgtcgctatttacaactcgaattatttggtaggaaatgtatcatgcttaaccctttctgttttagtcatttgtaatgtatgggttattctggtaaatgatgaatcggtgtttggcttaaaattagtacaatcacaattgactcaagatcaaaacaaattccatcacataatcggtatagctcaaaatgatttgaatatgacattagataacatttttgtacagacaattatttcaggcgaaaataataccatattaggtaattatagcaatcaagttgccgtacatcctttatacccatcggaaaaaactccgtttgatgttctcatatatgataagaatcataacaatctaatcaagaattatacaatcggtttttcatatgaagagacaaacaccaacggaagggaccttgaaatacattctacaagttccagactagatgcaactgggttttactatataagtggtagaattaccaataacatgaatactatagcgaatagcacaactataattgcagccctaaatgacagaaataatgatctaattggtatatggaaagcccaagcagaaccatacaatatacctccattgtcaacagcttcattcacagttccagtaacatctcgctcgcaaggatttaatatctacaattatacactatattcaaataattcttgatattgtttactataacgagatacaataacgtatatggtaacagaataaaacagaataaaagagattattctgtttgaggttgctttagtgaaagcacatatttttctatctcattaaatcgtagcatcgcgttctcactttgcattaccggagcaaaagtctcatcatgtttaattttttgcaaaacttgaataacctcatctattgtgactccatgtttaagatcataatccacctgtttgcaacaatttgctattgttccataccttttgtgctggcgcttttcccatatgctagcagtttctgacaggcctgtaataaattttttaatagttttttcaacatgctccaaatgccattgcttcatgggaaaactattttgggtcaaaaaaatatcattatatagtacatcacacatacatataagtgaaacttgcatttttcaggttttggatattaacagataaagacccctatgatagatgatataaacactaataaaagcaagtgttttccactttaccctcatcctgtattactaatagagacctcaggtttcaagaattttttagccatttcagatgtgcatgttggattggaagacaaaataagaagaaacggtatattaattgacactagaaaaaatatagatgaattaataaagctactgagcaaaattcattcagatactggagttaaggaattaatcatccttggtgatttgaaatcatccataagaattataactagaacggaatgggataacgttccttattttttggaatcattgtgtaaattattcaatatctatcttattcctggtaatcatgatggtaatattaaacaattattaccagaaaatgttaatctaatgcgttcgcagggaatggaaatcaataacatactttttacacatggtcacatcctaccccgaattggaatgaatgtggaaaagatcatcgtaggacatttgcatccgatcattcaaaaagaaggaagtattttaaatggtaacaaaatctgggtaaaaatcaaattaactaaaaagcattttttgggaagtaacaacaaaaaagatactagaaacattgaactgattattatgcctcatttcaacaacattttagactactatagtaagataaataggaacatatcagggaaatgtggaaaatctaaattgcctttattagataacatgataaataagctaaactggtcagtagaaaaagcttttttgtttaccatggatggatcaatcattggttcggaagaagaattaacagggttactttactaaggtcttgtaaaaaatcatttttttaatagctatccattggtcttatcgtcggctcattatgcttagtccactccaaagttttcacgaatgaaactgtactttctacagtcgtaagaaccggtactcccatttctacagctttgcgtcgtatttgatattcatcataaagcattccaacatatttttcaatagtggatgtcgatggtatgtttacaataaaattaattttcctttcagtaaggagggacagtatatttggatgtctttcgggttcgctaattttgtatactaattccacattcttaataccagatttcttaaaatattctgcagtatgttcagttgctaatattttgaaacctaacgcagatatcagtgaaacgattggaagtaatttttctttgtttttggttccccctattgtaattaatgctgatccttcagtaggtaaagaatatcctgcggccagatatgattttgaaagggcatcataaaatgagttcccaaaacaggcaacctccccggttgactgcatttctactcccaatacaatgtcagctccttccaactgcataaaagaaaattgcggaaccttgattccaaagccagatttcttgagccaatgttcattatctatcgctggaaaatcattgcccagaatggatcttgcagccaactcgattagattcaaatcatagaactttgatacaaaaggcattgaacgagatgccctaacattagcttcaatcacataaacttcattatcctttaccaaatattggatgttcagtggaccctttacattcaatgctttacctatcttaacggtatattcaattatggtttccattgtttcccgatttagtcgccaaggtggaatacacatcatagcatcgcctgagtggattcctgcattatcaatgtgctcaataatcgaaccgattacaatttcattggtgccaccaatggcatcaacttcaacctctgatgcctcttccaaaaatttgcttattactattggataatcaggacttacactcgaagcttccaaaatgaactgctcgagttgagattcactccaaataactttcatcgccgcaccacttaaaacatatgacggtcttactaagacaggatatccttctgtattcgcaaatcttttagattcttccaaattggtaaacattttccaaggaggctgttttattcccaacacatctaataaatggctaaatttagaacgatcctctgcattgtctacgtctttactggacgttcctaggatttggacatcatatttactcaatttagaaactaaattgtttgcactttgtccacctacgcaagctactaaacctttcggattctccttttcatatatatctagaaccctttccaaagtcaactcttcaaagtataatctatccggaacatcataatctgtggaaaccgtttcagggttacaatttataatagatatattatttaccccattctttcttaaaccaaataccatgttgactgtcgcccagtcaaattcaacgctactcccaatcctgtatggaccagctccaaggacaattatagaccggtcttctttagcattaccaaatgacaaatcatcggagtctccgttgtatgtgaggtacaaataatttgtttttgcaggccattcagcagccaaggtatcaatttgctttactactggcgttattccgaatttttttctaaactccctaacttgatcttcttgaagattcaaacatctaccgacttgtttatcagaaaatcccagttttttggattcttcaattaaatgtaaatcaaattttgaatttttcaattcattctctttgtcaattacattcttgattttaatgagaaaccaaggatcaatagatgagagtttgtttatccgatcaatactaattccaacctttattgctcttacaacattgaaaattatttcatcgtctgggtgaattaatgaatattctattttttctatgatagaggcatcatggttagcctttgagttttcaatctgtctagtcatggaggtatattcaccttcatctccatcgtttgcgaccaacccgtccttgccgatttcacacatcctgatggctttctgtataacttcttcaaaatttttcccaatagccattacttcgccaacagatttcatagcacttcccaattttctttttactagctcgaacttcctaaaatcccatcgtggcatttttactaccatatagtccaacgcaggttcgaaacatgctgacgtcacttttgtgattgtgttgacgagctcaggtaacgtatatcccaaacctatttttgctgccatatatgccaaaggataaccagtggctttgctagcaagtgccgatgatcgtgataggcgggcatttatttcaatcgcacaatattcatctgaagaaggattcaatccgaattggatgttacattccccgttaattttacaatatgtcgtagctcttaaggcggcgtcacgcagcatatgatattcgcgattattcagtgtttgtgatggggctacaacaatattgtctcctgtatgaactttcatccccaatacattttccatattacatataatcacgttgtttccgacagagtccctcattacctcatattcaatctgtttccattctccaacgtacttttcaatcagaacttggtgaaccatactcagcgaaagtccacgttgaactatttcctgcaaatggtactcattatatgctacaccgcctcctctaccgcctaaagtataggcaactcttattatcacagggaagccaatttcctttgatgccctcagggcttcctcatatgaataagcagtagtactgtcaagaacaggaacgttactttttaccattgcatccttaaattcctgtctatcttcagttaacttaataccttcaactgaagtatttagaacgcgcacatcatattttcgaagaacttcactttcatataggtcgaccccgcagttcaatgcagtttgaccaccaaagcttagcattatggaatcaggtctttctatttcaataacccgttcaacaaaatgtctatttattggtaacaaatacactttgtctgcaaatttactgtctgtttgaatagttgcgatatttggattaattaagacactagatataccttcctctttcaaggcctttaagcattgagaaccagagtagtcgaaatggcggccagatatttgatctagctttcgcccgcttctccgatttttattgctccgctacctaataccaggaccttacgtatattcctgtttcgaggcattccttttcatcacaaatgacattttgactaaaactatgaacattaggaattaaatttatatcttttctatggtgccacgattccgtatgtctttactagatccttaaacttatcaaagacatacaagcagtcgtcagggcctggtgaggcttcaggatgaaactgcacagctataactggcttctccgtgtgttttatgccttcgaccgtctgatcatctgtattcttgaaccatatctcaaaatcagtcttgtccaggctgtctgagtcgattccatatccatggttttgacttgttattatcgtatgatcggaaaccaagtccagacagcttttattttgaccccggtgtccaaattttaacttatgtgttttagcgcctccagctaaagcgagaatttggttacctaaacatatccctagggtagggatagatctttcaattagctcaaaagcggtttctatagtctccctacaaacaatcggatccccagggccgttgctcaaaaccacaccggtcggcttatgcaccattacctgatcgattgaagaatcccaaggcaaccttattacctggaaaccaattcttaaaagatttcgaataatgctatatttagtaccagtatcaattaatacgatttttggatatgactcttttccataatacgtaggcttactaattgaaacctcaggcataaaattataagaattgtaatcaaaactttcatcattcttgttttcagacttatccattacaattttagcattcatgacaccattagatctaatcttttttgttaactctctagtatccacgtcacatatccctggaattttctcatcaaatagccattgatctagcgttctctcacaggaccagtgacttgagacatttgataaattattaactatcagacctcttgtttgaattctctcagattcaaaatattttggtaagccataatcgtctaaatccttctgagatggaacaccataattaccgatagaaggatacgtaaaacataatatttgccctctataagatgggtcggtaagtgtttcggtgtaaccgaccataccagtattgaacactatttctccagatacacttgttggaaagccaaatcctttgccttcaaaaaaagagccatcatcaagtactaaccttgctttataatctgtaattctgtttaaaagagtcggaatttttttgtccctcacaaaccaaaaattaaaatcatttataaatttttgtaaatgattttttagcaactaatccccttgctataattatattccctatctctccactttatccttgcatgtttttctgaggtcaatatagaccaaacaaatgatagagacactataaaacagccaattggggtgcctaaaaagtaaactaccttatgagtactggcttttttcaattgataaaaatttgtcacatatatgcttagtatgttcagaattgtaaataacatcaaaatattataagagagatcttgatctgcgatgtgcacatagtatgcaactgaacaatatataagaacaaggaatggaaaaggcattaagaaaaatatcccgatggtcattaggatagagtttaaccggtcagtaaagtataaaggaatgatcaatcttttcaaagaattccatagggtgttaaaatcacgtgcccagtaggcttctaataaatcttcaccacggaacatttttaaattataaccttcttccttcaattttttacctaaagctccgtcttcaactatttctgatttaacaatggcgtgggtaccaacgctttcatagcattctcgagttattatgaaaaagctcccaaacagatatccaatactgacattaggatcatttactctaataggagagtatctagaaaacataaaaactgatagcacgggcaataccatttttacaatcaaatttgggtatttcaagtttggaactgcggtcataacatccaatttttccttaatcagcgtacataatgaatccctaatacttctttttgaatgaatggtatcagcgtcggtaaaaataagatatttaccttttgaattttgatatccgacgtaacatggccagttttttccaacccaacctgagggcttttcacctgcttttaatattcttactcttgggtctatcctaaaattctccatcaaatcaaatgtagaatcggttgagttatcatcaacaagcaataactcatagtttttaatgttttgatccagaagactttgaatacattttttaatatacttttcttcgtttctagcaggtataatcacactgattaattccccctctaaatctaaagtatcatccgaatagatctttggggataattcaaatgatcttttcagcacagaaaaaagataaatccatattcctgatgagcctagtataattacgaccaagaataagttaattattacggagatttccaccattgaatcaactttcaatttgacatataaatataacacaatactatcgggtaattagtaaacatttttaagtaaaactttttataagcttagataatgtttagaaaaattaagatcgataaacatacatttagtttatttttccttgtaatttccacattcttactatcccaaagttacagtgcatcaatttcatttgctcaaacagaaccaggctcagcttctggagtaacacaaagtccagcacaatcaatactcgtttgcgagtttgtgcaatattgttccaatccggtggaattgagtacaaatgttaatgacacagcagctactcctacggttacacctgagactgaagctcaaacaccggcagagactgaagctcaaacaccagctgattcatcagagcttttgccagatgtcacatcaaatatttcattgataatgaccccagatttgccaggtaatttggctgtagattctcaagactcagttaatcaagatttattggccgctaatgaaacccaactggtctcatcaaacgctacggaggatagtcaattagtagtccctgaaaatgcgacagtaattacaccggacgctcagatcccattggaaaccgcatatgaaaacaagtcaatgacaattcaagataataatggtactaccactcccggtagtagttcatctaatcaaagtgagttagcaaatacagttccactcaataatgtaacaatgtctattgacggcagtaatatgtctcaaagtgcccctgttgatgaaaccattgatacaacaggtgcaaatgaaaccattgatacaacaggtgcaaatgaaaccattgatacaacaggtgcaaatgaaaccattgatacaacaggtgcaaatgaaaccattgatacaacaggtgcaaatgaaaccattgatacaacaggtgcaaatgaaaccattgatacaacaggtgcaaatgaaaccattgatacaacaggtgcaaatgaaaccattgatacaacaggtgcaaatgaaaccattgatacaacaggtgcaaatgaaaccattgatacaacaggtgcaaatgaaaccattgatacaacaggtgcaaatgaaaccattgatacaacaggtgcaaatgaaaccattgatacaacaggtgcaaatgaaaccattgatacaacaggtgcaaatgaaaccattgatacaacaggtgcaaatgaaaccattgatacaacaggtgcaaatgtaaatcaacaagataacacatcaaatggaaatcaggttcagcctaattctaccccgatctctgaaaatcaaaccgctccacccttcttcttagatcccctaattaacccatttaaggaactttttggaattaaataatattctatatatttttttgactcgttgatacaacatgagcgaaacggagaataaagaaactgaaaataagataacatttgaggaattcagcaaagttgagcttaaggttggtaaaattctaagtgctgaaaatttgccaggatataagaaaatattgagattaaccgtcgatttgggtggtgaggaaagggagattatgtctggattggccaagcactaccagccagaagatatagtaaacaaaaatgtcatagtttgcaccaatcttgaacccagaaagtttggagatcaggtttcagatggcatgatactggctgcttcaagtgaaaatgggaaaccaattctattaacagtcgttgaggatacaattcctggcactcaaattacataacacaatcgatattggattttttgactcgaaataaatattttccactaatttgctatttccaagatagtaaattcagtttcccagatgctaagtgtatttctattcttaatccccgttttgtatctgtattcacatagtcgaattgatccatgaatccctagaaagtattatgagttagtcatgtcaaagcccagtagatcaccattatattcaattaactgaacaaatatcaaaaaattgtctccaacatgaattcagtttgctataagattataatccgtagaaataattaatgattggtggataatcatctcattaacatcgatgattcttctgataaatcattaccaaccgaaagaatactgctcacaaaacacttgtttttaccctctggaaatttcatgtgggaaatacaaagcagaaaaaacaattcaagttactatctggaccatgcactaacattttgctcctgtaaggggttttattataactacaataggagaaaatgctatcacctatctgacgtagttaattacattgaaaaatcaaattatacaatctccatttatgaagacgaacattattatcaattagttaaaagaatcattcttcatattatttctaaatcgtaagcaatgatatcttaatttcaaatatatattagataagaattctatcgatcatgcatgagtacgagaatgtactaatcgtaggctcaggtggtagagaacatgctttgggttggaagatttctcaaaataaaaatgtaaaaaaagtaatatatgcaaatggcaatggtgggactcctcagaatattcagatattacctactgaaataaacaaattagcaaaatatgcaaaagaaaatgaattatttacggttgttggtccagaaataccattagctttgggcatagtcgacacgtttaattcttacgatttacccatttttggccccacaaaaagcgccgccagacttgaaaccagtaaagaattttcaaagcagttcatgagtaagcattctattccaactagcgaattcaaagtatttactgatgctgaaaaagctgtagattacatcgagagaatcaattttggcgctgttataaaagctgatggactggcagcaggtaaaggagtttttgtgagtgacaacaaaacggaagccttggatgcaatcgatcagttgttgaacaagaaaatatttggtccggcatccgaaaaaatcattgtggagaagaaaatcataggagaagaagtttcccttatggccatctgtgacggggaatctttcatgattatggatacctgcagagatcataagagagtttttgacgacgatcgaggcccaaatacgggaggtatgggtagttactcacctgttcctgaaataagcgaaaacgacttaagttatatttcagataaggtgttcaagcctgttattgatggaatgcaagcggagggaaatccattccgtggttttctttatgcggggataatgattgaaaaaaacaccggcagaccctttgttttggaatttaacgcaaggatgggagaccccgagtgtcaacctctaatgatgagaatgcaatctgacttgtttgaatacataaaagcagcagaaaataaatcattagattcaatgcaacctcttgtgtggaaggatatgttttctacttgtgtcgtaatgacatccaagggatatcctgacaagtacgaaaccggatactcaataaaaggggtgagcaaaccacctgacaagtacgaaaccggatatccaataggaggtttgaacagaatcatctgaccccgaaattatgatatttcattctggaacaaaactaaaccaagccaatgaacttgtcacctccggagggcgagtattgggcataacgtcattgggtaagtcaattaatgaggcaatggagaaatcatatgaaaaagtgcgagaaatatcttggggagataatcaacagcattatagaactgatattggaagaaaaggtttagaagtcgaatagatgacttaacctaaaagtatcatcctctcgtctgaaattagtatattcattttgacatcttgagcattacaagttattttttctaatattaattggaaatcatatccgagacccactaaagttatgttttgatgagcgttagaattaaagaatttgtcataatagcctttaccatatccaattctgttacctgttatgtcaaacacaacacctggcgttataacaatatcgagaaaatgattcatattttcactggttgcctcaggttccattatgccatatttgccaatccgaagccttttcgttggttcgtatttaaaaaaaataatttgatcatttacgattgtaggcagacatactgtctttgaatttaaaatagcttgagatattatttggaaggtttggacttcatttaagataggataatacaggccaataactttgctttctgaaaagaatcttgaaccaaggaatctttgttgagcagacatactttttataaaacaatcaaaagatgacaagttttttcgtaccaggaggaatttctttcttaagatttctttagaaggtaccatcttttactttgcgtacgcctttgaagccatgacagtattacgcagaagcatgcaaatggtcattgggccaactcccccaggaaccggagtaatgtagccggccttttcttttaccttttcaaaatccacatctccacaaagtttgccatctattctatttgttccgacatcaattattgttgcaccgtattttatcatatcatgtgttaatacaaaagattccctattccccacagcggtaataattatgtctgcattttgggagaaaaggtcaagatttttggtgtgagagtgagaaatagtaacggttgaatttttcctcaataacaatgatgccagaggcttccccaccaaattactccggttaataatcaatgcatttgccccatccaattgaatttcataaaaccggaatagttccattactccaaggggggtacatggtattagattcgttttattgttaagtaacaaacctgaattgacaaatgttaatccatcaacatctttcttgggatccaccatgttaattacctgatattgatccatatgatccggtaatggcaattgtatcaatattccgtgaacagtagaatcaaggttaagcttttcaattaatctaatcaattccgtctgtgagatatcaccatcaaatcgataatcgaaagttcggatccctattgagttggcagctttttgtttgttgttaacataaaccaatgatggcggatcggatccaacaaggattgtagccagacagggtatcagacctttagttactagcccagaaatttcatttttaagattattttttatgtgatttgaaaccgctaatccatctattatcttagccgtcaatatatccatctaaatatgaaattgatataattttagtcttattatatagataaatcagtacaagattaaaaattgagattcaaaataataaagtaaacatagtatttgcttacttgagtttgacctttattttgggcgagtcagttacatttttcaattttgctacagctagttctcctgcttttcgacctgataaaagcatcgaaccaaatgtagggcccattcgcggtaacccgtatgtttcagtcacagacattccggctgcaattaatccaggaaagacctcccctgttgaatgcacaactccgtcttcaccaccttctacccacattggattcatacctttccaatcaaccaaacctctttgcattaatcgtttgactgccacagaatcgtgaccggtagcgtctattactatcttactttcaaaggccaccgggtcaacacaagtaatatttctaggcagtgcggatactggcatccagtttatgaccaccccacatacctttttatttttcaaaacaagatcatcaaatttggttaattgtaaaaatctaactccagaatcgcacgctgctgatattaactttgagcaggcatctggaccccaagcggcatataaattatcattgattttcctatatggaactcctaattcatcccaaactttttgggctggggctctcactgtgactgggttcatcatatatccaccaacccaatagccgcccccaagatagttattctgttcgattatcaatgttctagctccgctttttgctatttctcttccagctgatagccctgcaggtcctgcacccaagattataacatcagaatcgctgtattcttgaatagtttcaaaaaacatagaagctatggaacgagtgatctccttttcactcacatcagcaaatattttcttctccatatgacaagttctttgtcgtaatattaatacatttttcgaatactgaatatccccagtaaatccgctactcaaagattgatcccacaaaaactccttatgtgggtaaagttagcccggcccgactgtgagaacggcgatttattttcccttgataagattcaagtaattcttgcgagtaaaaaagagttaatccggatccaagtttgttatcttattcctctttttgtcatatagcacataaaaataaatgactatacctattgataacaatgtaataacagagatgattggaaagtactttgaaagtgtttctgataagctatcccaggaatttcccagaaagtaacctgaaaaaaccaaaattaggctccatataagagatcctaaaaaagtaaaagttacgaattttgcgaaaggcattcgggctatgccagctgggacactaattaattctctgacacctggaaccattcttcctaggaatacggcataaacaccatatttttcaaaccatttttctgcagattctatctttttctcacttacaaaagcatactttccaattttgattatggcaattctgcctattttgagagagattaaataaatgacaatggctccaatggtcgcgccaactgatcccgatgcagccataaagaatgtctcaatataagtaaaattagagttgaatcctacgaatcctgcaagagggaatatcaactcactcggaataggtggaaagatagtttcggcaaatgcggctatgaatattcctagatatccataagaggaaacaagagatgtaataatattaatgatatccaccttgactcaaaagagagtacaacgcctaaattaattaatttttggtatgtttgaaaatttgaaaataagattaataaagtaattacactatctatatttgttgagcgataagaaatgtgctctttgtgcgatcatccttcccaaggaatcacaagtaagtatttgcaacgattgtctaaagtgtgctgattgctgtgtgggtcttgaaaagttgtagagtaggattaagttagttctacaatctttagtgtatcagttaatgtgattattcctattacattacctttctcactaactaatacacatttagcaaatcttactaatgaaactagtgcttttgcaggggtagattcatctacaagggggggtggtggttccataactgagccaatttttaccaagtgtatgtctttatcactattttctatcattattttggccagatcatcctcggttaatatgccaaccactttcgttccattgaagacgggcatttgactgatgctgtgatcacgcatttttaaaatcgctgtactcaatgattcctcgctttgaatagttatgagatctttattacatatatcaccagctttgatagacgcattactctccatcgagagcaaaatttcaaatattctcttggcagtatcataactaggtttacatctacctgactcgatttgattaaccatagacgtactgatcccgcataaaatcgctaatttcttctgggtaactcctaattttagtctggcttgtttgatataatcaagtctaggtagcatgctgaatagtatattgctctcatcgattaataattctataaactactaaaggatttagaacttctaataagctactgtttgtaatcaatgcgacggccgggatttgaacccgggttaccagattggcaatctgatgtcctagaccaaactggacgaccgtcgcattcgtgactttttataaaaatctaggttatattaattatatggtggctcatattgtcatcctggcccgacaaacatgaattaataagttcaggagcatatataaaatcacaaatcgcaagatcagtcttgtgaatcgcaattaattggttcaaaatcaaatatactacattgattggtttggaattggaaaacgtactattgctatagttcaatctcgtgtgtaggttctaatattttttctgtaccagtaggttttttcataacattgtactcttcaaaaagtgcatcaagggtatctttctttacaaaaaattccttttctatgaattcagactcatgattgtcattatattctcgaattagaactttaaaaactcctttctttatttccctcaccaagaaatcggcattttctccctcataattaaagtaggtcacatattcagaaataggtacttccaatttcccccaaataaagtcaaaaattaactaatattagtgtatcaactttcaaatgataaggtatataaccacctcttgatcttaaactagatctaaatcttttggaatcctttaaattttaaatagtaaataggtcttgtactgatatgcataaaaaatatgctgaaaaaccgccaatggtactaatttcgggatcatgtctcaacttcagaaaagaaagagaatccattttagaattagtgggtgaattagagtgggcctgtcattatcaatcaaaatttgaatgctcttccgttggaaagaccatgggttgggatttttttaatttatattttgaaatggagtttataacaacattatctcaagtacatccaaagatgcttaaagaagagggaaacattttagaacaacagttcgtgttgtggcttgagaagcaatttaaaagaatgaaaaaggagtatcaccttaaacttgttgaaaccccatatgaagtttcaaaagggtttagaatagatcctgaaagttatagaacggaggagacattatgggatttgagataatagatctttttttgcacttcccaaagatatgattcaacaattttacaaattggcaacagattgaactcgataatagttactcatgaatctgatgttgacggggtattttctgcgtcaatagcattgatgagatacccacagtccaaattagttttttcctcttatggcaaggataactttttgcggatttcagatttaatttataaagaagtagtctcaagccagggaaagggtttagtcattttcactgatttaggccttaacgatgaatcgatctcccctatttcggacacatttagttttcttatgtcaaattcatggtcggttctttggatcgatcatcatccttggtcagagtgcgcattgaacctatttgacaagaataaagcccttcaattggtacttgacagaggaggaaacaagtgcgcttcggaattgatgtacgaacaccttctctatgggaatgatagagcgaagcaattggcaagcatagcccacacctcagattatcttctaaaagatcaagatattcctcccttacccgagttgatagtttattataggactctttcaaatttctattcaaagcttactgtactggctaagagaatttctgacgggatattgtgggatactgagatgcaggcagattataatacatatgtcaaccttcggaacgaagcaaaatcaagttctctaaaaatggttagaattcaaaagttatcaggtggactcaatttggcagttgtcccggtttcttcttatatacaaactagcttgttttcagaagaaatattccaaaaaactaaagcggacgtggcattcttctttaataaagaggctaaagttagtattcgaagaaacaatcccataatcgaatgccacaagattgcagatgaactcattgaaggtggaggccacgaatacgcggcaggtggtaagatgaaatctgatcccggtcaaattgatgaagttttaaaagagcttgaaaatgctactgaaacatggttaaaaaaaagaaaatagaataaaagaattattgagttaaagatacctcaatataaacatcttctgggattttgagacgcattaattgcctgatcgatctgtcatcagcccccaggtcaattacacgtctatgaacccttaattcatatttatcccatgtattagtcccttgtccacatggagacttgcgtgtaacgacccgcatcttttttgtcggtagtgggtggggtcccttaagacgtattccgtttttttctccaatatccttgatttcggtacagacattttccaatgtcaataagtttgtgcttgtgagtttgattctagcttcttgaggcatctatcgtcacttatttcttgtttggatcgtgtttttcagtaatgttttttacgattcctgctgcgatagttgttcccatgtctcttaacgcaaacctcccaatttcagggaattctttaaaagtctctattgctaacggtcttacgggcctaatttttactattgcagcatcacctgttttcaaaaactttggtttttcttctacaattccacctgttttaggatcaatcttggctacaaattctgatattgtagctgcaacctgagctgtgtgggcatgtaatacaggagtatatccgggtgccatagccgtagggtgatgaattacaataatttgtgcttcaaactctttagctacactgggtgggctatcaatattcccaattatgtcacctctatgtatggcctttttgtccacacctctgagattaaatccaatattatctccagcttcggcataatccatctgtgtatgatgagtttctatagactttatctcaccaggcacgcctgatggcattacaataaccttctcgtttgttttcattttacctgtctcgactcgtccaacaggtactgtaccgacaccagttatagtatatacatcttgaactggaatacgcaatggtttattgataggtttttcaggaggagtaaaagaatctaatgcctctgctagtgttgatcccttgtaccaggccatattttcagatttttttacaagattgtcacctttccaggcagaaacaggaatgaagcttacttttgatgtgttataacccaccatttttaacattttctcaacaatttcttttacttcattaaatcgggcttctgcataattaacatcatccatcttatttagggcaactacgatttgacctacacctagtgtcctagataagaaggcatgttctcttgcttgaccacctggttcagtggctgcctcagtttctcctggttttactgaaacaactagaattgatgcatcagcttcagaagctccagtaatcatatttttgataaaatctctatgtcctggtgcatctattagcgtatagaagaatttaggggtttcaaatttttgaaatgccaaatcaatggtgatgcccctttctcgctcatcttttatgctgtccaatacccaagcatacttgaaggtatcacccttcccagttgcttctgactcctttgcaaaagaatcaatagttctttgatctataacacctaaatcgaccattaaatgaccaacagtagttgatttaccattatcgacatgtcctgtaaccaccaaattcatatgtggttttttacttgcgctcataaaagataaaaatcattcaggggtttatttgtatttcgctatcttatttttaataacgttttgaaatcatatttgtatgattatagaacagatcagtgaacagctaaaacaataaaaaccgtcaggttttatcccgggatccatgatgctgcattaatcatccgattaataaccaacatgccgatttagtatggttcttgatcatcttaataacatacttttatgagttcaggaagccaatatcgctcaaaactaatatgactaaaagttagtgattatttatagggtggctttattttctgttataagcatcctctaaccgtactatgtcggattcatcaaattcgcccattgagatttccaaaatcgtagacgagtattgcaaatttttaaccctgtgctttgaacccctgcttataaaaattacgtcgttttcatttagtatacttttatcaccatcgagttccacagaaatagagcccttcagaactttccaccattcttctcttttatgatgatactgcaagctggtttgagaatgcggattcaaatgtaataactttacagtgcatttttcattttcaacaaatttttcaaatttcccccagggtcgattctcctcataaacctctatcatgtttctagatagtaattgatatcgtgttatttaaaaataaacagcgcttttttttgggctttgaaattcgtagataattcccattgaaattatgttcgcattaacaacttatagatggcaatgaatcagaatcttctaataacaataataggactagcggattgaaatcaaagaatcatcaagtgtcccaaaacattggacaaatagattattacttctcttatagatccaagtagagaattcatcgaacgtaaatactcgctggtgctggattgcaatcggaacatagcctccaaatgttataacttgaatcacgacgaaatcttcatttacgattgcaagttcttgttccccataatcacttacctcatcaagtagtgtagtgtaaagtattacgggcttgcctgtttcagcaacggtctgagaaaggtccatcaacttctctttgaaattgtcaattaggcaatcttcaaaggacatttgtttacttacttgtagtctccgcacttttttcaagcaatctcgttcattaaaagaatttatctacattaaagatcattacatttgacttttaactaataatctttacacatcattgccaattatttttcaattagtacaaaaaaaacttgcgttacaaatataaaaatcaatgaatcaagattaccgccgccgcccactcgataacctctaggagatggtttgctctcgaaaagtactgctttggctattttgattgctcctagatacttcagaaatcgtatagtacaaaattctttgataatttattttgttcacactttgctaaaaaaatgtttaatatattagaatacgataagatagaataatttctattttgaaaagaagtgatgcacattatttaacttcatattctaacaatagtgcaagagtttgttatagtaagtttcgctacaatgaaactaaagtatgtaaattgaaatttctctcccgtccaattcaatctttttagatcctttatcttcatcggttttctctgaaaattctattttgtttacacgtaccaaattctgcaggtctatttcgaaatcttgtaatttcgtaatttcatcagaagaaaaattggaaatatacgctgtatccaatatttgggtaggagaatatcctaattcttttcgaagttgctgaatgtttcgagccaaatccttaactaaaccttttattattaattcctcgtttctagaagtatttaacaggagaatcacgttttctttttctcctaccacataacctctagttgggacaaacgcaaaatccatgtcggtaatagtcaaatctatagatttacttggcaaataatcgaaatgataaaacccctccacttggagctgtttgaggatctgaatcttatcttcactttcaaatttgtcaattaataagccgatatcacctttaacgatcttggcaacactttttctatttatggtaattgatggtattattggagctttaaagttcattaaacttgctattttttcaacaatagtatttgctttaatctctttaacctcaatattttcaatgttcatctgttcttttaacaattcttttatccctcccacatttagaaattcaatctcatcaacgtaaatcaatgcggattccagtggccacctccttttcaacttgtgtcggtttcttaatgaaaatgataatgatgatatccccttgatcgtatcaaatgccgtttcaacttctttattagctatcagggctaattcttcaccctcagggagattttccatcagaattgaatcaaactgcttaaaacatgattggtaaaggtattcggtaaaaaatggacatatgggatgaagtattatatcaatagtcaatagacagcgagatagaatcctatatactgtaaatcgtctattctggttatccagatcatcgctccaaagatcatatcttatcagagggacataggtttgactcaatgaatttattataaagtcttcaatcgcatgagaagcttcatgaaatctgcagttccttaacagttgagaggattcgtcgattaggccttttagctttgttaagatccaaatatcctgactcctcagggaaaggtcgttagccttccagcccgactttgagtaccaatcttcgaatttgaatcgatcatagacagcattttgttgataatagatatgcaagaaaaaaagtgtgcttaaaacctgatgaggtctagaggacatttctttaatgtcaaaattcaaaggctctattggagaagatttccaaataaagtataatctcaccaggtccacaggattgtcaattaagagggattttgcatcaacgacatttcccaaactcttgctcatcttatttcctttatcatccaaaacatgacctgtgaacaagaatgattgaaatggagcttgagggctttttttgaagataacatttaacatcaacaaagtgtatgcccaacctcgtgtttggtcaatcccctctgtcaaaaattcagctggaatcagtgtaacgtattctgcatcagaaagtgatgagtacggggcacttccgctgttatgccatgtatccaaaacaaataattctcttttcattttattttgacatttgggacaattaattaaaacttcatctatccagggcctgtgcaattcaaagttttctccatccggcaaatatgaggctctcgcaacaattgattttctggaaaataacccttccttaaaagaacatttagtacatttccaaattggaagcggtgtaccccatacccgttccctcgatatgcaccaaggaaccttttccctaatgatctcgagaaacctattttttggttgctcgtaaaaataatttacttttgaggcagcggcaatgggctggtctcctaaaatatcaatcatgtagaaatactccttccttgccaaccaaactattttgtgatgagaacgccaacatgtaggatatttatgagtcagtttgctgatctttactactgaatttgtcaattgcatatcattaacgacaattggatccacatctctgacgaattgatttttatatttgccagcatctttggtaaagaataccttatcatcaatgggtacaaagattggtatttttcgtctagttgcaatttcaaaatcctcttctccatttgccggtgataagtggactattccgctaccattagtaacatccacaaaattttctgcgaccacaaaatggatttttccttgggatgcgagatcattcaaaccgggtatgttttctatgattggatgaatgtaatactggccttctaattttatgcccaaaaaagtatcaaccacatcatacttttcaatcttaaggtcggccatcaattccttaactctattttcggaaacaatccatttttcattattgcctttaaaatcgacctttaaggttagatatcgagcctcagggtttacacccaccaattcgtcggtaactagagtaaaaggcattgtagtccatacgactaggaaagtttctgatccttttagttttaccttataatagaatgaaggatcttctacctgctcataactttgattgatttcagcattacttaacgatgtctgacaagaaggacaatatgctacaactctaaaccattccttcaatatcccctcctcgaatgccttgccaatgtatttccattctctttcaatatattgatcagtataagtccaataacccttatcataatcaaatgacattccgatcaaattatccacttgtacccattttttgttatattcaagaattaattttttacaagtttcgacaatcttattgattccaacttttcgaagattatcagatttattaccggttaaacctagaatcttttctgcttgaagttcgaccggtaaaccttgagaatcccatcccggttgaaactccatcttctttttttctattgtagattttctgaaccatagatctttaattattctacctctaatatgccccaggtgtggctccccattcatagtaggtggcccctcgacgtagcctattgtcgttctaaaatttttagtatctccaagatattccctaatggtcctttttattgtgggatcatcataatatgctctaacatgattttcaaacgtctttagctcaaatttatcccccaatttcatattatattgaaaatcaaatgtccatccattcttaaatttttggaacttgaagtctgtttcaagttacaaaaatataattcgaaatcagcagcagttaatgaggtggtttaatgttgtgattaaactcaaataccctgtgtgcatgacctttgtatatcctactgaaactcaggaattatagaaaattgtagaaaagtttctctcgtataggagcagatgtatatggatacctcccacaaatagaattatattaaaattgtaaaaatcaattgttatgaataagtttaatcaaatcggagcaggaaagaatccacccagtgatatttatgtagtagttgaaattcctaaaaatagtaatattaagtatgaattggatgaagagactgggattctatttgtagacagaaaacttcacacctccatggtatatccatttaattatggatttgttcctcaaactaaggaagaagacggggacccaatagatatcctgatactgagtaacgatcaattttctccactttcagtgatcaagtcaaagccaattggtgtcttaattatggaagacgaagaggggaaggactctaaaattatagccgtaccacatgaaaaaattgattttgattactctaggttcaatgaaataaatcaattggatggtcgaactttagataaaataaagcacttttttgaacactataaggaattagaaaaaggcaagtttgtaaaagtcacaggttgggagaatagcaaggtagcagagcggataattaatgaggggatggagaggtttaagaaggaatcatagggctttaaattgttcactccaacgcatataagctcttatcatatctgaactcacgctaggctttcttactttaaacatttctttgaaatctgccaaattcaattctctaggtagatcatcttcaactaatggttcacctttttcaaaaagttcattcacaacccttagttgtgcagactgacaaatgtctttgatatcactagcactataagcttccgaaagtctcgccaattcgtctatttttagtaatgggtctttagttaattttgaaacatactgtttgaaaaggttgcgtctggaagccatatcaggaagggttacatagatcctcttttgaaacctcctcaaaaatccagattcaagactccaaggtttattggttgcacctattacataaaggaatgattctttagattttccattaattccatccatttcggtcaaaaattgattctttactctgacttctcctccaacctctccattcctggtccctaatagggaatctatttcatcgataaataacaatattgggattttttctttctggtgcaaagccctcgcaaaagtaaatagttttgaaatatttttctctgcttctcctaaccatttgctcatcatagaggctgcatcaatatttatgaaatacccgtgtatctcggcggctgcagcggcggcaagtaaggtttttccgcaaccaggaggtccaaaaagcaggattcctctcggccaacccagcgggaataaatcagcacgtctagttgggtatacaatagattcacgaatagctcttttggcatcttcaaggcccactacctctttccaactcaccaaaggcttttcctttagtatcaggttttctaactctgaactcaactcttgtatcttgtttgaatctggagattgtgagttctgccgtccatgatgaatatcgttgtgcaaatttgttttattaggaggaataacgtgattatttcttgagttaatttttggtaattgattatcaatcataccagttctcttagattcaggttcaacggaagactgcctatcatcctctaatatgccgtttgccatttgtatagattttattctgttctgataagcacccgccctctctagataaactctatttaatttatattccggataaatttggactaactttattaatgcttcactagccctctggtaggagtttattgctgatgaatgtgatccttgagaatcgagtttgatcgcttcggcggcatatttgcttgcagtattctctaattcctgtggtgcaagtgtcatagtattatgttctcaagttatatttcctatttgtttgataggatatgaagtaaatagttttaatcaaaagaataaaaaaaaataaaccttttttgtgtaaatcaaaagggaattgtagttgtcttttttttaattattaatataaatattttgacacatgttcttactatcccttgtgatacgatactaatcatgatgtcaactgatggaaatgtaaataacgaaattcttggtggtctagaagagttgggattgtcaaaatatgaggcatcagcttattatagtctgcttggaaaggggatgatatcagcaactgaaatagcatttcactcaaatttgcctagaacaaaaatctactttattctaaaaaagctggaaaaaaagaacttggtttttataaattaccaaaaaccattaatgtttagagctctttctcctaaggattcttttgacaacatattaagtaaatacgagaacaggatcaaaagtttaaaaaaaataatagaaatacttcaacatattaatgaaaagggtttgaaaaataagggaattgaggagaaaagatacctcgtcttaaatcaattttccacagacagtaagattattgaattgctaaaaaatacaaatgaatcaattgacatctccctaaatcattggggtaatgtgattttaaacgcctcaaaagaagaaatattgaaggccatatatagaggagtgaaagtaagaatcctatttgactttatgtgcccagctgattcaataattttgcctaacgcgattgaaaaaaaaagtgctaaaattagtacaaatatgtttatctttgataataatagtatgataataatcaataatgacggtacaaaatcagcatattttgattctcatgagatttttgttcccaccttagctagtcaatttaacgacacatgggtgaagatggaaacagaatctttgaaaagcaaaaatatagaacctattaatttgtaattggtcatttaactggataaattagataatcacccaataatatcatattccttcatgatgtatggtaattcagtcaaaaggtcagaagcgagcatatgaaagccgatcttttttgatagccttaatcctgctttcccgttaaaaaataaaccaagcaaacaggaatctactgatccatatttggttctgaatccagtaatgaggccggaaagtatatcccctgtccctccaacggtcattgatggggttgttctttcgataacaaaagtgctctccccgtcagatattatattctgatatccctttaaaacaattatcaagccaaattcttttgcttttcgatacaccaattcgacctgctcagataacttaccagtagggctatcaccaaatagtcttttgaattctccagcatgaggggtaactatagtttcattcttgcatatactaggcagtatatctggaagcagagccccagcatctattactagattagaatcgccctctaatagcttttgtacaagtaaaatcaatggttgtgattttgatacattcaatcccattccaatcgccgctgcatcaattcttttcggtagggtgtttaacagtcttctaacagacccagtagttaatttatcatctggaaatggcaagattatcagatctggagaaaagattcgggaagaaattaagttgatctttggaatagcggtatagaccaagtcagtcccacttcttaaggctgctagagaggataacaaaggtgccccatgatagattctgcttcccccaaccaccagagatatcccgttttcaccttttcttgaaaggatatttcggggtttgacaatttttctaataaggttatcgtcaactaaagagtagtctttcatgttcgataaatattagagaatcctcataataactagttttaatgacaattaaatagaaatataggattaccttctataataattggactattgaataaaaaggaaaagggttcaattaaagatacccaaacagagaacacagatcagaaattcactgttcccatagaaatcgatacacattatcaattgtacggcaagcatatgtgggaggtcaactactttgaaaaatgtcctcggtgcaataaacggattgacgaatttggctattgtgcatgtactggatttgcagagtaattaaactcaaatatcctcagcaaaattgaccgcaatttttgttaaattaatgagaaaagacaggttgttattttaattgatgtatattgattggataataattatatagctgttcgaatagatattatgtatgagtaacgaagttatgggtgcggtaacctatgaatgtatgtcgtgtggcactaacgtaacagcagaagagttgtcatacttaccagaaataaaatgtatttgcgggttcagggtatttagaaaagtaagacaaccgataataaaacaactaaaagcgatctaagtgaaaattagatgtcctgattgtaaagaagcggcttttctcagcgatgatttttctttagtcaagtgtgataaatgcggttttgataagacctatggagagtatgttaaatacgttgcatacaaagatgcaagatattctgacgtattaagtgattacaagtaaaaggatgcaaataaagccagcagacatcatttagagtggtgtgaaatttgtatggcaattaggtctgaagtcaaagaaaagtatgagttaggcaaatcagaatacatgtgggcaaagaggaatatgcctattctaaatcgattaactcataaatacgtctctaaaaggtgcttagaaaattttaaccttggtatttgtctacatataacaaaagaaacatcagtattgctgatggccctaaaagatgctggtgccgaggttaatttgtgcccagccaatccactctcaattcaggaacctgtcaaatctttcttgattaagaatgaaatcaggattttttctaaagaggatgggatcctcctagatttttacagtaatatggaaagcgtactagataccaaacctcatatcattacagatgacggtggggagcttcacaagagagcactatctagaaagtacaacattaagggtggaactgaagaaactacttccggagtaaacagacttttggcttggtgtaaagaaggtttgttgaaatacccgatcatcgccgttaatcgctcaagagcaaaatccctgtttgataataaatatggaacaggtcaaagtacaatagaagggatagtaaaaaccaccgggattttgttatctagtaagaggatcgtagtttgcggctatggctgggttggaaagggagtagcaagatgcgctaatggtatgggagccaaagttacaattacagaggttaaccctcttagagcattggaggcattttttgatggctttgaagtaaagctattggatgaagtaatatcaaaggcagatattttcataacgtgtactggtcaagtaaatgttatagggcaaggtcaaattgaaaaaattaaggaaggtgcgatattatgcaatgctggccattttgacgtagaaattgacataaattatttgaattcattagaccagaatcatttttctccaaggatgaatgtagattgctatagagtgggagaatgtagaaaaaaaatttacctactagcaaaaggaagggttattaacttggttggtgcagaaggtaactcaccagaggtaatgagtatttccttctctaatcaatttttgtctattgtttatctttcgcaatttcatgagaagttagataaccaaatctataagacaccaaaaaaaattgaaagaaagatactattgactgcattggattcatttggtttgaagatagacagtttaactccacaacaaagtcattatttcaatacatgattttatcaactggcatatctatttcttttaatttttaactttgacccaaccgcaaccgctgtttagaaaacgaattatgtggcctacttctcaaaatagtattacaacatggacatttaaccccctgccattcaagaaacaattcacattctttgcataatttgtagccttggctgtaataactaaaagagtcgtttgttttatacgctttatactttttgcagatggatctacaatacatctctaaaaaaataattaaccatatttgtcattctgctacgtatgaaatctaaattatttttcatataccccaattacattaattacttaagaacttaactgtctattttcaaagctaatgggattaattagtcaatcaacaataaccggaacagtatctgtggagaggaaaggcattttaaaaattcataattaaacaataattttaaacttggctaatgaatcaaaaataaattagttctcaacataatatcatactagttaatcctttcttttttaagaactaaactgttaccacacttgtcacaaaaacttgatcttaaatcaaataaagtcttacatatactacaatacttaatggttttttttgtcacaaaattttttttccctggggttagtatatttatagaaaaatattttgcagcattggccagagcataatcggtagataaaatcggtaaatgtagctgtaaactaagtgcaattaccgaatgatcagcttttgacaattccatttgacctaaatctacacatttttgtctgaccattgaatggaacttgatgtctggttcttgaattattacctttcctgcagttatcaataaatttaacccatcaatccgtctcttgatgtgatttatttcctcctcaatattaggtgttatataataaatataatctgaggtggtctgaaatggtattcccccataaaagatattggaatcagttacaaatttttttctagaatccaagtttgttcatctgtcgggtatcatttttattaaatctgagaaacactgcatcgtatcggtattttgaaatttttattggctgattctcctggatttcctttacaagctgtccatccataatcaatttaaggtcatgatttgcgctaatagtaattgccattaaaggtaacacaaaggaaggtagcctattaacggatcctattggagtaatcagcatacattccaaatgttcttgaagtataggtccaccattggatagggaatgtccagtggatccagtaggagttgaaactatcattccatccatcttttgactatatccgtcatcgttgatagagaggtaaaacaaaggtgttttggtaagatctgaacgcattatgacgtaatcattcaaaacaggggccataacctcatcatcaatctgtgcgactattcttattcgtctatcgagaaaataatgtccttctaggagtgggtccactattgaatcaactgaatcttttgagacctctgacaaaataccacgcgtgccacctgcattaatacaaagtactggtatatctggaggtaacgttctaaatgttttgatagtagttccatcaccaccgattgcaatggccaaatcaacctcaatatccaattccgggctatgtaaatcataatcctttttaaagtctataacactaatcccttgttcggccaacttttctcttaacaaataagaaactcttctagattcttcattatttcttttggtaaaaatggcaatacatcggattcgattactcaaacaattaatgataagacatgggggtatatttttttactctttgtagttaagaagtcagattggttttgggatttttgactgaatttttacttaaaattgaaacaaattgctagaatactatacctggaatcataaactaaatccgaacagaaaaataatacattcaactttgaaacagctagctatggttgacattggttcatattttcaatattttgtagtgcagagttatagataatttttagaagaaattgggcgtcagagattattctctgttgatatgattgtatttttaccaaaattggggctatggaacacaataaattacatttatattacaaaaataaagcctttagaaaatagaaaaacagggccgatagctcagcttggtggagcgttcgactgataatcgaaaggccgagggttcaaatccctttcggcccattgagaatataacataacatccttgtggttctatctattatggataaaaaatttaactaaaatgccatttagattttcaatattgtccttaataaaacaaatacgaatccatggagaacgcagatgtaaagatttgatattgttgattagtcaaatacaacaatcatagtgaaaagaagatctaccgaatatcgattagtaagtcattggaggctcggtataaaagaagaacttcttgtgatcctcaggctccattaacaacattcgatggatattgatcttcccaaaaattatggaatcacaaaccgaacatgaacgggagaatgatatggagacctatggattcataatctttctctttagactacaaaaacataaagctatgtcgatattattaatggtttaaaaaaaaggagatcagtagaaataataggattactttctgaaaagaggtaccatacctcgcgaaccatcttcactcctctgaccgagatagaggtcggccaaagtataatcatattacactgttcttaaatccgtatccagagaaacttcaaaagtacgatttaaaacttgtctatcatataatttaaaaactaaaaaaaagattatgatgatctgtgattagcagctaccctttgaccagcctactttatatcctttagcatagtcacctgatcctggtgagtatgataagcaatggtcatgatcataccatccatctttacagcctgtgacccatgcgtggggtttacttgtctggtctgaacaataagatgtagcggcatgtgcattttgattcattatcaatggagttagtgccactgatgctagtgctaatgcaattactaatgaacttagtttagtatccatcagttttctactattcgtatgtttatataaacatatatctaatattccggaaaaagaacattcatagacttttatttccaaatgacgtcaattacaaatgtaattattaatttatttgactgttcccctagcaataattagttccacggtaccaaccttaaaggacgatacgtacctctcttattcttgttagcaaagaatatgcggttgttcaatggttttgaacaagaaatattatgtggacaagcaattgatttcaaaattatccaattcaaaaaaaacaagcagcgcgctttgcattttctaataacgctatctccttattattcctaggtcaatattttatttgacgacatttcctaacaactgtcttttgactaaaatgttttaaaattagtttctcaaaaaatagcccaaattgattaagttaattctaggattttattgacactatctggattgcaatcaaatagaaacacaatataactaagtgtcataattttaaaagtaagtagtatattgataatcacattagttgagatccttttgacatgtaaagaaatgaaattaaggatgttttctcagagtatatcatcattcccattcccgaattcaatattttgattattatttgagtaggtgcttccagtgaaaatgtattctatgaaatctaattttgaattgtagagtgatatctgaattaagctcctaattggtctttgtacatcaaaataagaaataagattatgatttgagctatcatttatcctcaataatggctcgactatctgaatcaaatacacttagcgtcttattggagtgatatatactgatatgagctgattctaatacgaggatctaattgccaattttagtccaagtgattaagcttatctatatattttcaatgttattatggtttatgatttgcacaattcggaataatagatagttattcagctggtcaatcatttctgctatgaatatttaaataataaattcgtgtcaatacggcaattccaagcattagataaccgatattgaagaaaagatcaaataaatggttatcttggctaaacccaaataaatcatcaaatccaaaaattacatttgctaggagaaagaaaaacccgcacgctgaaaagagtaaccaggagagatatcccttattcaatgaaatctccttttctctaaagtagtataatacaccgcttatgataataaacaaatcaaatatggggtatgcaaaaacaagcatcaagtcaataaaattcccactaagggaatacacatcaaaaatgaaaacagaaatatataatacataaaaagaaataaggaaaaaggtgactagtaagctaataaagatacttagctcaattttgtaggttttatttagtctccacaataacaatacaaaaaaaatataccctgtaagataaaagatatcggctatagaagggtaaggatcggtatttagaactccactatagtatccaaagattgcttccgctaaaaaccaacatacaaatgataacaacagaaacaattgcacactatccatttggagtattgattttccggttctaagaatcaggaagaaaatcaaataaacaacagttccacaagatattacatttggaatattataataaccaagataagattcttcgaaataaaataaaaaggaaattgcccctaaggtaacaattaccaaaattagagaattcaaagataaactaaagatgaaatggaaagtcagaaatcagataaagactaagttacatattactttttatcagacagtaataatcgaataaatgtgcgtatagaaatctatttaatatttctagtgttatctcgatttgagttatcacgaaagtagcaactaatattttgattttaatcattccattaatcataggttcaatagttattacatccatcctttcactccaaaatatttcaggagttcgagcaaagttttatgatatttatgaattgtctggtatccagctaatgaacgagctctctgttgaggtaaatgaaattgcaagagatcttaggagtttgtcaacccaccctatattagctaattctactactcccataaacgaccaaattagattacttcaaagatacattaattttagtaactcagaatatctagctgtatctgtttatgatagaaatggcacagctatcattgatacatcaaacggatctcctgatggaaatgctttgcaagaagaatttttcaggcaagcattaacaggaggaacttattttgataagaatccgaatgaaatcgcattcaatcaatcaggatttcatttttcggctcccatctatgattctaataaagttataaaaagtataatggatcttgaggtttcaataagttttatagacaaggtgttcaataacacactcttttacaaagatattgaaaatagtttgctgaactttaccaccagactaattcatagtgacggctcaacgatatacacagcaagccagcaaaatgagtcccatgatatgaatggtaaacagaatttgaacttccctcttctaggaactccaatcacagaatatgaaaaaagaaaatctcaggattctattctgattgaggttcctgaaactgaaagtgcgaatggttatcgatctgatgggaattggacactcttacttgagggaaatttatcttcagttatgagtgattataacaaaacagtaaacggtttcttgatttcttcaacgttgattttattagtcgcaatagtagttactgtcattgctgtaaagaaaattacatctccaattactcacttgaagaactcagcgttagaattaagtaaaggcaattttggcaaggaaataatggttgaaggatcaaatgaggtaaaagatctttctatcagccttgaggcaatgagaagaaatatcgagaattctaaaaagaatttgattcgtaaggttagagaaaggacaaaggaccttgaacgggcgaatgaagagttgagaaccaaagagttccaagttaattcaattaataatgaattgagggtatcaaatagagtccaggaagaatttctttcaacgttaagtcacgaactaaagactcacatggcccccatgaagctgaatatcgaaatgatgcataaaggaaataaatcagaaaatctaaacgaatttcaaaggaagacactcaccattatgcataggaatatctcgaagatagagaccatcatagatgacatttttactttgtataggttagaattgaataatttatccatcaacaaggagatgaccaatattatagaattagtagagaaaaacatgttaggactatcccccctaatgaaggccaaaaatatcagctttatttcaatagttaatgtcagtggaagtgtattatgcgacccagtaagaattagccaagttttgttcaacttggtaaataatgcagttgagcacgtccctgagcaaggtgggaaaatcaccattcgagtcgatgaagatctaacttatagtaaaatgagatttaatgatattgtcaataaagaacacaaatcagtcatatttaccgttgaagataatggaattgcgatacaaccagaaaatatggaattactatttaagaaattttaccaaatagatgcgggccttgcgagaaattttggtggaatcggattaggattagcaatatgtaaaggtataatagattctcacggaggcaaaatttggatcgattcttcatatcggaatggcgtctctttcaagttttcccttgattcattatgacaccgagaaagtgttaaaatgaataatatgaaatattccatgttgaccatgaagtagtgacaattaatgacaatgaaagtacaacatggactgtgaatgatttttttagagttggaatatattagatataaaacagtgaatcaaggtttgtatggcattttaaaaattaaaataaaaaatttgactttttattactcgacgtagtcaatgcaggacacaatggcatagatttactcgatgaactctgaagagaacgaattgaaaatcagaatctaatcatttttagagcatcaggcttcaaactagaatagattgatgatttaatagaaatcggagccaaggaatttatgaaagcctatctcatttgccaaattagaatacgttaagtgaacatatttgaaaaggtaatatcttgtcaaaatcaggccttgaacagggaggtttgttacttttatgaatgaatcagatttagtagtagtggtctataaggagtcatagtctttttcaatgttgcttcatagataataactttgataatatcattttgatttttcgttttatttttttaccatgattatttttttacccgaccttggataaataagacattattattaattagtagcaaagaaatttctagaactagatatggtaattgagattataaataaatatccatcattatcataatccataatatgaccaaaggtgtaggcaaggaaaactcatcaaaataaatcaaaaaagttagagggtattattcaaaaattgagcaattacgtcatcgaagacctttatcggttgagcaccctctaaggccgctatttttgttgaattatccttaagaataaggaaggtaggggtacttgcaaggccgagacctttagcgaatatatcattttgtaccacaagctgattgaatttatgtgaattcaagcaatctgtgaactgcgaaatgtttggcatgtttacatttttggcaaatcctataaggctatcagtactaatccaaccagtgttttcacctcttgaatttctataaacctcgtcatgataatcccaatatttattctgctcggctgcacaataagaggcctctgcaccaagtgtagataatttatccttgggtaggtcgttgatgaccagatccttaaaaccaaatctcactatccctgtatcgacgtattttgaaacaagctcatccttagtttcttgattgaatctagcgcaaaatggacattgatagtcaccaaactctataatatttaatgtggcattattatcaccaatggcttcggcgcctggaatcacgggagtagtcagattggaaatcagttgctgggtatcagcgggattagaggaggatgacttatttttgcctccaaaattagaaaatgctgtaattgagcctccaattaaaagtgctccaaatagaactgccataattagtagcttgcgataattagttttaggaccatgaggtttcctgtttctatgcttcaaattagaacaataattgaaaaaccaatcggttatttaaaataaatatatggaaaatacagataactatatccggattcaaaaggtcaaaatatgaaaaacatttcttaccttaattgagtttggatttaataagctcaaatgctttttcagcttggtctttcttgggtaattgaacaaaaaaaatattactgctttttgattcatgtggtgcaattcctaacattccagcagttgaaagaaatctaaaaaaatcgatactttcattagcgaataataagaaatcaaattcaagatcggcattaagaaaatttatattcaaatttacaaagacatggtgtccatcatcataaatatttaagttagtatcgatcaagttaggcttgccataagatttattcataatattttcgaattgaacattttcgatgagtaagcagggcactttaattccattatagtcaatcacagaaaaacctaatttatgaacattggctaggaaatcttcaagggaattcaagtttttattcaagtctacacaacaacttgaaaattaataaaatataaattagatcatggttgcaagcataagactagaggtcgcgggtcagcagatttggatagattttgcgagaagtatcgccttttgtggatcctctgatttgatttcgtcactatcgtatttcttgctaaaatagagcaaatcagccagtttccatttgtcaatggttaccagggtagtgccatttttttttacgtttgtaatattagtagtcaatattaccaatttatcaactactgagttctttttagtgcttttaacaatcttgtcaaagttcttgttcttatcagaatcgactgcgatcgatatacccaccttttttcccatttgatcgttatatattgcatctaaataatcggtatcgatctgttcatcatatttttttacagttcccaattcatcaaaataacttatcaaatttctgacagcctcttttacattcgattctacaatatccttatcaactgatatttttctcattttaataaaatctgagatcggtattcccataatgcttcctctcaaacgcaacccgggatagacgtttttgatcgtttcctctattgattgttcgtctatatttgaagaattcttcttcaaagacatttcgaatgcatgatataagacatttaagatagatcttatattccgaaagtctggaaattcatcataaattatttttatttttgatgagatatctttcctttctgaggatgaaagttcattgttaaaatgcaacacatattgaagaacaatgctatttatttcatcgaaagaattggatcctgccaaatcaattttataatttgctttttctagacgatcgaaaagtgatggattgatcttggaaatatcagcgtacaaggaaggggtagttactatcataaacaaggcatacgggacgtgagaattaattaatcccttcaaataatccaatgaatttaagttggtgtcaaactcatcgatctgaaaaatagtaatttttttaaacaatttatagttgatcatggccaagttggttaagaccattgtaagattttcaaatgtttttaaatcggaatagtttaatgtgcctgtcttgataatttcagtaattatatgtgtctctattttagtaaaatcatttgacattaattcaaataaatgttcgtaagatattctcatttttctttcacccatttgttctatcttgtcagaaattgaattcccattgagtgaatcaaaaaacccgtattttactatcttctttactaactttggattctgtacataactatctttcaggtaatcaattagctttacctttatggagtcatagtattcttttccaaatccgcttacaatagaatgaaagaaattatcgatttccctgggttgaacttgagttaggtcgacgtatgaaataattgatttatcattgacttctgacaaagtcctcatatgcaacgttaaatgtgttttacctgatcccacatcttggattacagagattatcttgaaaagatcttcatttagaggctccgtactatttaatttcaggttcaattcgtgcaagcaatccttaattgaatttaacgctgcaatgtgccttttccccccaagaatattggcactggataatgtgggtgttggactgctaggaaaaggattgacggttagattgtatggtgccatcaaatacatctcacaaatccatgtactattcctcttaacacaactccctcatagcctccagacgataactcatatttttctggatacaattcaatcagttcacttacaaggctgtaaaattcattattggaaagatcgcaggattcacacaactcgtctttaaccgaagagagttccacccaaccaattgaagttgaacgatttcctattactgtgtcaaagtgttctttaaatgtatcaatagatatttgattattatcataatcaatgttagtgggatcaacttttatattatttattttatcttcgattctgttaaaggaattcttaacttctactaattcgccatcaattttttctacatatttaaatatgctatcagagtagttgtttaatttcttttgaatacctaaaatagaatcgtatagatatttgaattttatatctgatgagagtaaatgatctaggtaataatcctttccccagcaataaacatacgttccttttttagatatgcatattttatcctgtgccgttagttcattcaaggtatcctcaaaattatcctcaggatattttttctttaattcagatttctttactcctgcagaaccaaaggaattaatatcattatagatcatatctaaatcggacatactagcaaaataaaaaaacaagataaaaaaaagatagtcaataaaaaataattatgctgtaaaaaaaaataaacaaatataagaattaatacatctgagtgagatctatgggaatgatgatacatttgtctgataaaataatgatgatagcactagggtatctgacctaaattacaaatatttggaccgtttgataccggatttattatatacattaataaatattcttttgacaatagttctacagttaagttgttcaataatgataaaagatatgaagataccgtcggtatagatgaaataactaaaagaactaatagattgctagatgaatttaaggagaattacataaagaacaataaaaatgattttattaatgatgcaataacaaatatggttgtttgttgtaaaacatacgaaaaaatattcgcaggtttcataattgtatcacaaagaaataacatgccacaagaattaattgaaggatttgtaaaatggtctaccggtcaactagaagaccttaaggaaaaaattcaagaaatagataaaaaaagagatatgcgatgattatggcgtttatttaaattatttgtacatcgaaggagttaaattcaggattagagtgtttaatattgaaaacttgtgtcattgagtggtcgagtagaatcttctgcgattaaagattatatcgaggtttcaaagccgcgaattgtaattgtacttgtcattacagcggtcacctctatgcttgcagcgactagatttgacggtacaccaaactcggcttgggatatatctggatggaaattattgtttctaataattagtggatccctttcttcaatgggagcaagtgcaattaatcaattttatgataagaatattgacaatttgatgggaagaacatccaaaagacctattccatcaggcagattgagggcaaataacgtgttgatatatggcctggccttgtgtgttatatcggttatcctcgcatggttcacattaaatccgatggcaacttttatgatagggttgggaatttttttctacgtagttatttacacaatacttcttaagagaaggagtgtttggaatatcgtaattggaggatttgcaggaagtgcagctgctatggcaggttgggcaacaaccacaagtagtatagatgttttaggatttttggtaggatggattgtgtttatgtggacaccacctcatttctggtgcttggccattaaacaaagagaagaatattcaaaagctaaagtccccatgctaccggttatttatggtaatcaagtaacggctaaatatatttttataaattctttgatattaattccctattcactttcattgtatttttttggattaggagttttatatttaggtgtagcagcggtgtctggatcgctaatgaccttctaccattacaaacttttaaagaatccaactccagaactagcatggaaagcatacaaggtaacagcaccttatctagtaataatttttgttgcaattgcccttgattcgttatggtactttagattttagtaagatttggatgcaaagaggggagctcaactatttttttattttgttaattcaattcttttcttatcttttgtcaaccaacttaccctaatgagaccgtaaatctccaggtccaacaatactttgttaaattcgtcttctaatatactaacaccatctttagacatagaattaagtaaatcctgatcggtagtggtacctagctgtttaatcttttcaaatataatatttcttataggataattcacattatcaattctaacatggagcatattataggtttagaaataaaaaatattttttactatgtaattaaccataaaagatcttgtcttgaaattttggaatcgcggttgtcaattttttttctattgatgaataccagttatgtatatcatttgtaattgatggtttgacagtgttaagtgcctcctcgaaatcgacattaaagatcatatccgaattcttgtgaattgcattgattgctgcaaatctacaaagggccactaaatctgctccactaaatcctttggttagcgacgatatcttgttcaaatctacatcagaagatataggcatggcagatgtaatttttaataaaatatcgttccgagaaatctcatcaggcggattgacaaatattatgagatcaaaccttcctggtctcagtaacgaagtatccaggagatcgggtctgctagttatcccgattactataaccccaaaattaccagaatcatccatttcagacaagatttgtgataaaactctttcatttccagaaacatcatcagaggtacgtggtcgaccaagagaatccaattcatcgaaaacaactatgcaaggggatgaggatcgagctttcctaaatatttctcttatggccttttccgattctcctacccattttgataacacttctggcccccgaacaaaaatgatattcatggaaccttcatttgcaaaggatttagctagtagggtcttaccacatccagatggaccaaatattaatgccccttttgctggctttattcccattttcaaaaatttttcaggagatatgataggagacaacaggttttccctaagcaggcttttttccttaactagacccccgacttcatcccaggttatattcgttggttcaacataaaattcccttagcgctgttggtataatttccttcatagcgttaataaaatcctgttgattaattcttatactattcaaaatttctgtaggcacttgattttggttttctaaatcaaaatcagttagagttcttcttatagatttcattgcagcttctctggagagagccttgatgtctgcaccagtatatccattcaataattttgccaaatctcttaattgaatgtctgaatcaagcggcatttcatgagtatggatttttaaaatttcaaatctaccatccacattatgaattcctatttctatttcacgatcaaatcggccaggtcttctcaaagctggatccagactatctggtctgtttgtagcacccaaaacaacgacatttcctcgatcagacattccatccattaaagctaataattgtgctactactcttttttctacatcaccaaacgtatcttctcttttaggtgcgatggcatcaatttcatcaatgaatataatactaggagctgattctttggctttttgaaatatctctcttagtttgctttctgtttcaccataatacttgttcacaatttcaggaccattaatgatataaaaatttgcttttgactcagctgctaatgctttggcaatgagggtctttccacatcccggaggaccaaaaaggagaatacccttatgtggctctatccctatttttgaaaatacttcaggatgtctgagtggtagctctactatttccctcaaacgggtgatttgatttttcaagccaccaatttgctcatatgtaacgtggtaactgtcatgatagagtttttctaaacccgttctgatcactattttggtaaacttggtaatttttaccacttctctagggagagtgctatagactttaaactccaacgaggtccccaaaaaatttagggtgaattgttcacctttggtcacaggatatccttcaaatcggttatttaaatacaagttaaattcatctgaaaaattctttgaagtattgcacgacaatactactctttcagcaggtttaggttcagcctttttgaccaacacgtagtcattaaggctaatacctgcattttgtcgagtctgaccatcaatatgaatacaactgttttttttagccttatcctcaaaaccaaaaacagaaacggttgttattttcttcccagcaatttctattatatcaccgtcagaaacccctaatttctccattgaaatgcggtcgagaatcgcttttttctttcctacatccttgattctacactcggcaactttcatcttaatagttgttgctttgtgggaaccagtgagagatttatcttttcttttcaaatgaatccagatgctaattattagatattatttcatctttacagattgtctgctgatattcatgacttggatttctccagccccgtctattttttttatggactcttcgagtttttccatttctccttcagcatcatctaataagaaatcacccactagagcatttaagccaaatgctattggctctttggcatgcgccttcaattccatgccctcaggaacttttgatttcagaacattagccaatgaatccatatcagtttctgaatctgctggtagaattttgatccgtgcaacaagtctagccattttaattatggtccctcgaatccacaccctacacatttatagggcctggcaaattctctacagctctgacatctccagataataacatacccgcaatttggacaataaaatcttacacatgcatcgttaggcatgataggtctgttacaagaggtacaaacaggtaattgtaactgctttgacatgttatctaaaggtctgcaaaccgcatttatatcttgcttagatcctgaactattttacgatattcattacccatgagagtacgcatcaagtttatagtcatacgagtattcatgaagcgtttgagagcaaatgaatgaaaatcaaaatcccctgtagaagagatcttttccagggtgttttttgatatatcagaaaatattttgtccaacgctctattatctagccgttcaagtattcgcctaaataagagtaacttatcaaactcacttccaaatctggtcaaccaatcattctcatactggtctaaaaacgaagaatcaccatcattcaatatagatttggatatggcacggccagcataaattccccccattccccctgtataaattcctcctgcagtcgtaggtttggtctgtcctgcagcatcccctacaataacggtcttaccgttataaaacggcttgacatatccactaatccaaatgggagcatatatctttctgacgatcgaatatggtttgcctcggatttccaggaatcgttctatggataaatttggatttatgttcttacctgccacacctactttgccctttccttcgccagttgggataatccaggcaaaaaagcctggataaagatcagaatcaaaaataacttctatggtatctttcattatccacggggcatacacttcaaactgtcccgatgggattatgttcctcctgcctttatttactagtgtcccgactccacgcgcatcaacaaaaaaattgctaccaaatacttttcccccttggatcttaacttcgaattgattctcttcgaaactaacggaaataatagaactcctagtgttaatctcagcaccatttttctgagcttgaagtgctatttccttatcgaaagatctcctatctatcactataaccctttgattttcagaatttatgccaaaagagctatttcgggtccgaattacggcgctctttatttcgttatctacggtttttaatctagggattatcccgagactttcaagtgctttttggctgacaacccctccgcaatgttctggggttccaatttcgtgatcttcttctagaactagaactttaagacctctagacgacatttcacgagccgccaaaagtccagaaacactcccacccccgactatggcatcataatggtctgcttttaatgctgaagtcaaaattaatgaataatattaattggacaattatttattctatagagcattaatatcacaaaaagatgattaatcgatcttaaagtacaagttgtaatgtaaattcaataatcaacagaatagcagctgatctataaaaaacggaaaaggaaaactttcagaatcttatcattattatgcgacttgaagacacattaagttagtagaagctaatagatcatgtatagaatgtatgacaaaaatagatcaatcaggatagaaataacttatcgattaattgattgcagttcagttatttgatttgttgatcactgcttacacccaagaaaaaaatctatactcggtttaacttgatcgaatgcaatctgaaataatattgtaatggtttcccgtcgatccaaatctatcagactcgtcatattttatcaattgcgtagaatgtctattccaggcatttcatctccagctaaaaatctaagcgtcgcaccccctcctgtagaaacatgggttacttccttttcagaaaccccagatatcttcatggcctccagggtatctcctcccccaatcagggtctttacccccctccaatatgccaatgccatacttacagcaacactcttagttccgttagaaaatatttctttttcaaagtaccccattgggccattccaaaaaattgtgcccaagccattattatgaatttcaaaactaaacttttgaattgtcttgtctccaatatcaaatcctttcatgttttttggaatatccgcttcaacaatatagtattggctactatcatcagaagaagccaccttatggtctatcggcagaattatcttatcgctataatctcctaaagccttagtagcccatggtaagtagtcctcttcaatgagagaatccccaacagaataaccttttgctttaaggaaggtgtatgaggcagcacctcctatgagtactttatttgctttgggtaaaagatggttcaaagctccaattttatccttgattttcacaccgccgattaccaacgtgaaggggactgaaggattttctctcaatagtgataagtattgtaattcttgggtaaggttaaaaccagctattctagtgtcgaaatactgggcagttccataagtagaagagtgtttcctatgggatgtactaaacgcatcgtttacataaatgtcagcgtaattagcaagtttttcagaaaatgcaggatcattcttttcttcttcggggtagaatctcaaattttcaagtaacaatacatcgccatttttcatatcgtttatagtgtcaatagtatcccgacctatacaatcatctgaaaaagtaactccagcattaaaggaagataacatctcacccagttttattgatacaggtcgtaaagaatatctcaagtccttgccagaaggtctgtctagatgggatgcaagaataactttggcaccccgtcttaccaaatattctatagttggaattgcagatcttattcgataatcttcactaacagcattatctttaacctttacattaaaatcaacacgaacaaatattttcttgttaagataaaactgatcatcaaaatctgtaatgaattttatctgtcccataaaagagataaaaattattggttataaaatatttgttgtgaaattttattatgtggtaaatatgtgaatggataggttcaaaatatcatcaattccttcaaaataaaacaagttacccggcgattacttttattttgccggtaatgtctgtaagtcatttttcataaagatgtattaaaatcctcaaccctcttcgttcctaacacacaagtaactatgtggtgtattatttaaccgataatactagtacctaagttcagaaaaacctgtcatcattgtcctgaaatcccggtacggaaaacatgatatagaatattaatggtctttgaaggaactcataattgtagagaaccggctgaatccctttcgatataatcataaaaaggagattatttacctaaagtgacccgcgtctcaaaggcaacgccagttattatgaaaaaaggacacagtcaaaaaggttttaacggacaaaattgctatcattatatcaaattatttagttcgtaaaggcccgacgaaatatgcataataggcactagtggatcaaatatttagctatataacaatgggggaaggaaaccccttcatataagcacgttaaggatataataaatatagtcagtctattagttttttattctacctatttataataacgacaccaagtgacaccagtactgtcataattacccaaaatacatctgtatattagacaaatctgcttatataacaatagttcatctattcgttcagcatatgggatgtaaggcttaaacgaacatcaaatatgtttagcacaactttcgatctttagtatatcagtaatggtacagcaatttctaaatagaatatattaatgataatattttatatcttttcatccaaattttactaaaaattatataaaatatctcaataataatgagtttccatttcaatgatcatttatttggcaaaatttagatagatatggaccatcagagtcatatggtctattttataagtcttttagtaatggcgaatcaaaaatattgttgaatgataaaaatacagactataaatatggtaattagataatgttgtatcctgtttttgttagtaccatgctggatttaccagattctatctataaaacttgagttagcaaatgcgctcagtcgtcatctgatttaggtttgatccttcttaataggagttattttagtaatagtcggacatcccaccttactagaagctactttgaaagcctttttggctaattctaagttttctttcgtaacatgtgcttcatatatggtccttcctcgttcaacccgggcggctaagcctgtggctttaccgaatgctcgtctcattccctcttggagacgatcagcacctgctgtagcaatcattttattttctcttaaaattacatgcggatatacgcgtagtctcgaaaaaaagctcatgtcacctgcttgagccatcgttttattacctgctagccttgcagcttcaagagagttatgacgaatttgaattcgttctgtaaccgttaattcgactaaataatcataattaccttttgcttgtccagatgcaaatcgagcaattttaatttgaggtttacccttaatatactcacgccttacatatggcataccacgaatttctctataattgacacctttcacaaatattcctctctttaataaataaatgaggctgttggctgtgatttatttgttatgtcctcagaaaataatgctcgcaatggctttaccgattcctctcaagtcggtggacctatagatttagattcggcgtcacttaccacagaaactttcaatgagaaaaccagtaatgaggaaaacattgattcgaacttcctgatagaggcgtttcatcatatgaaagaaggaaaaatagttgttcctgagccaaaacagcaagatcaactgaggaacaagggatttggagaggtctttaacaaagaatacttgttaaatagcctagagagtctatatttacttcaaaataataaaatcaaaatttacaaaaataatacagagtatgatttttctacttttttgaagacgatgataaaaaaagacaaaaagatcttgacaaagtatttgatttttagagatttgagaagcaaaggatatgttatcaaagaaggatttgggtttggaacagattttagaatctacgagagaggagaatacaataagaaaacctccaaatatgtttctataggattaaatgaagggactaacataaaagcttcggaatttgccgaagttattgaagaagtagaaaacatgggcaagtctgttgttattgcggttgtagagcgaaggggtgaagtaatttattacaagacttcaaagatgacattttttgacaacaagaaatccaagaaacaagttacctgagtcatgatctaaacatataattctctctttaaaaatgatagatacagagatggcaaggaaaaatgattcagaccaatccacacaggacatttgcaatcagatatttgcagttgataaaaacgtaaggtttgttggaatcgtaaatagggaaggcgaagttatagaaggcggattccgaaagggaattgagccattacttgatcagaatgaagaacaggatatgtatcttcagtctatctcaaatatcaccttttttcaatcattctcagaaaaattcggcccagtagactacctattgattaaacaaaagaaaatcaccatgataaccattccctataaagatgagatattatgtatatcagcttcttctcactctgaaattgacagaattagggatgaatctatcaaaattgtttcaccttaaagtagaaggtgtttcaataaactattaaataaagtattatatccatatacctttgacttatatggaaaaagtagtttgcgaaatttgtttttataaaggaaataaaacggaatttgaggaaagcagtgattactgcatcgaatgtgtgtgtgatcatgccatgtgcccaaagtgcaaaaaaccatatcacgcagccatgattaccgagtagctaatttaccaaattttatcatggggatagacttatagaacatactaataaaatgctaaatacagacgttacaagacgatgatgaatatgatagtccccctattacattgaaatcatttcaattaaaatgaagagaataaaccggacttccgagttttgtgacattttttgttactaaattgcccaaaaaacagaggaaaatattatcgtttaatattagcatttttacgatgagatgtatttgctttaaattagtcgcggagaaaataagcagataatagattgaaagagacttgcaccgaaaatcatcacaaagtttgtcaaaccccggttatcaatttagatctctatgagatagaaaattgttaaataacaaaatataagaagttttgaactatagtttattacttgtgaaatatttaaattacatgtcaaattattaaaattattatagttaatgttgcaatatttatatagcctaaaaacacaattaaaagtagataattaatgttcaatgaagattcttgcagaaggtgtggtctgatcctgactgcaatgtgtagatgtaatgattgcttagagacttcttcttggatttgcaaaaattgtaacaactccattgaccgtatacactttcatggatttgaaacatctaatccaggttcaaacaaagttcacctcggaatttatagctcctaactccagagtaaacccatcagtttaggttgggagaaaactattcaatattgaactgacctcagaaagatttcatgattacctggagtataatcctcccaagatacaaagacgatattgtccaatacatcaattgtaatagaaggacattctgaaataccagggtttgaactcaaattgtagaatgtgtaatcgtcagtttggttaaagcttctcataaacagaaaaatttccttattaaatgtcggttcagaatcgccattagtattagatccaggttcaacaagactaccctcaaatgatgtgaacaatttatcttgataagcgaatgtatctaaattagctgcatcaagaatttgatttgcagatataggaatttgatcgattgtaaaattctgaccaccatccgtactttttgcagtaaaaagatttcctaatttatttacagaatccttctgtacccatgttatgtatacatatttatcaaaagcggaaacttgtgacttaccgctgccaaagctgtcatcatgatcgaatctaactgggctgctaaaactttttccaaggtcttcgctcttaatgaaatatattccaggcttatgatccggcaactcctgttgctcttgaacgacactaggatggaaccggttatcggcgtctacattccaggtaatatacacattattctcatctgcaaacacttttggataggaatcgctgctataacctgaaagcaaggtttcgctgccaaaggacttacccatatcatcactaacccgcaaagcaaccgaagaatgagtagaattagattgttgccatacaacgaagacatgtttatcatttgaataaatatcagcgttagatgcattgacattatcgttacttaatataagactttttccaaatgtttcacctccgttttcactagagcgtaggaatacttgtttatgaccattagagttgtcaacccaagccaaatagatattatttcctgatgaagcgatatgtggatgttctgagaacccggaattattgctgatgttaagggtttcattgttcgaaacattgtctaaattgacgtttttaaaaaatatatcataatttctatcttctagatatgaagctcgaatcttaaagtttgaatcttgccaaacaagagacaggttattcttatcaatgctttggatctgcccatatacggaatcattcttattgttgctaaggttatacaactgagaaaatgctgagtcatcagattgattaactactttggagaacacaagattaattatctcattgttagagtaggggataatattagataatggaattatcagcaaaaataggaatattgtcattatgctattaaaaattgaactgaccgtgaattttgtcaataaagttacttgatggattattttatatattttacttttgattcacatttcatctaaagactactcagtcctatcaggaaggagtgtttttctttttaaaatctaacgacaaggaattaatgcaatatctcaatccagttggattgggaccatcatagaatagatgacctaaatggcatccacattttgaacaaactacttcctttctaatcataccgtaatcatagtccattttttcttgaattttctgattactagacggagcccaaaagcttggccaacctgactttgaatcatacttactatcagaatcaaataaaacagagccacagcacttgcacatatatacaccattttctttattgtgcaaaagatttcctgaaaatggtggctcagtcccacgatttacacatacttcaaattcctcaggagttaatttttttttaaatttgatttagaatattcttctgacatttatcgatataataattgactacattatttaaaaatttaacgatcagggaaattatcttaattcttaaaattatgtttatgacaaatgtaactttgtatggcttctagctttaatgaaattacgattttctaaaattataaaaggtcattccagatctgccataaaaatctaagggattgacatgtcgaaatcacttttcaaattttgaatcccaaatgagcatccaaaaataaaagtttttatttaatcttggggcactaaccattgattagaaataggcaaacgtaaagttttaaacgaagctcacttgaaggaactggtcatgccccaggaaggagagttatttggaagagtcattaaattagtaggcggggataatatcattgtaaagagtaatgacggaaaagttaggacatgtaggattagagggaagataaaaaggagaatgtggatacgtgataatgacttggtattaattgcaccatgggattttcaatcagataaagcagacattatttggagatacatcagcgctcacgcagacaagttagaacaagaaggacacctcgaaggtttgaacagatagaaatcacagtatattattccattgtaccccgccactgacccacagcaaaatcatagttagccttacactacgtgtataactcattgcgcactctctgacggggattattgattataaaattaaactgctatatatcatttaactaagagaatcaggccctgttaacttaacgataaatctttagcttaaagacgctctatttctgttatgttaagtacaagaaataaaacatcttcagagcatatttactatggtctgtatttgtactttctaggcttatcgcttagaaatactgccaaggcattgtcctttttacatattatcaatagaagtcacgttgcaatttggaattggattcaaaggtataaacctcgaaaggtttcaacaagaagaacaaaaatatcagaatacctcattgatgagacattaataaaagtcggctcagaatactcctggttatgggcagcaatcgaaccagaaaataggcaaattctcgcactctttcttagctaataaatccaaggagaggaacatgcttatcgcagagagatttatttcaggtctgatcaagattcacggaaaacatgtcgtatcaacagacggtggaacctggtacccaatggcttgtagattcctaaaactaaaacaccatatcaattcctcattagagataagcctgattgaaagaactatgtagtacatcaaggatcgaactgaaggatttgacgattactttccatgtagtaaagagaagtgtaaactagatgtcaaaaactggttgaatctatttgtaaaaatacacaacaaggaggtgccagacgcctaagttaacagcgccgagaatcacagtaactaaataaatacccctttagcaacaaatgatcgtgctttacatgagattcataaggctgccgagacaccctggaaatcaaaaatgagcattgtcaatgacatatatataaaaaaagaaatcctgtattactaggttccatctaaacaagaccacaaatccttatacgatgagaaccttatcaagtttcaggattttaattactgctgataagttgaattcgaaaatagttattaacgtacgcaagttaagattatccaaaacttgaggatgaatttcaccgatctctccaattacatcatctaccaggaagatttttgcagaatggcctggaagaaaataagcaatgtcatatcttggtgtagtaacaaacgcattaaaacaatatctcatgaaagattccaaattggatttaatttctgtatagtctgtcgtattgtgagctattgaaacacagagtgaccaattttctctgatttcattatttgtcgttgagaatgtcttacctatctcaaataatttttgaggatatttttcatgaatattgttagaaaaggtgtttattaaagagggaattagactgttcctcaataactcaaattcggtattttttgaatcacccaaagaaactaaatttttatctaagtgagcatcttccaaaaaaacatctttgaccaagttttttgatattacattagaattgataatttccataaatccgaggccaattaatatatcacgcactttatcaaaaataatagattgactattctttcggccaggaaaataagtaacagggtataatggtcctaaattgaagattccataaccaatagctacctcctcggatacatctactttatcaaacaaatctattctataactaggtattgtacattctagtttcccattacctttgtctataccttcacatctacttctctgaagacataccaagatttcgtcatgggttagtttgagtcctaatatcttattgatatagtcaaaatccaaatgtattcgatgtggttccaatattggagtaacaatttctccataaaaaggagaatcaaccatcaaagaatacaaatcaaatcccatatcgctcaattcaaacgacaggattgaaagtatatccttagcagacttagaattcactgaagtaacttctataaatagattactagttaacagatcaacttttgttgtgtttccatttataataggtggaaatgaaataacgttatcctttgagtcgattaaaataggaactatatcaaacttttccaaaatgtgaccatacttttttccaacatcaaaacctgtaaggatattgtcaaggctgtattctttatttccatctaatggcacaaatttgattcgtctggaaacccctttgtatgaaagcggaaatgtcaatgcatcataattatgtaagccgattgaagacttttttctctttctacctattccattatgcaaatcttcttgcatggatatcaattgtgttaattctttgtcattaataggaaaatcccgtttggcaattaaaccataaataatgggtcttacatctttcaaatgttcatctactcggattaaacttgaggacggctgaagatcttgtatatcaggacatcctaattctacattcaatataccttttagagctcttacgattccgttctcagaagaaaaatctggtcgattgggattaaactctatcttaattttatcattattcttgtcaaatccttctatatcgagacccaagtatggtaatttttcaataatttgatctaaagcccttccaggaaagattcttgagagcaaagatggtctaaggcttactacaggcatttagggacactctttagccaggctaaattatttgaatataattcacgtatatcatcaagattaaagcgtaacatggccaatctttcaaagcctcctccccatgccaatacaggattttttattcccaatggtttagttacctcaggtctaaaaattcccatgccaaacaattctatccatttatcaaatttctcattatataccattgattgaagagaaggttcggtataagggaaaaaggtaggccagaacttgattcttttttatcccaagtttagaataaaattcggattgaattccgattagctgtcttagattggcatcttcatttacataaatcccttcaacttgatgaaattcaacaaggtgcttaaatgtcaccttttcgttcctaaagacgcgacctataagaaaaactttatctctctccggtttaccttctgacaagtattggagtgtaacaggagtggtgtgagtccgcaaaacgtatggtttagattcttcaatattccaatcatactgccaattttccctatggattttggatacatgctgcagtaaggaagtattttttggcaaaggagaatagagatccgtttgggatttcaggtagaacgtatcttgcatctccctagctggatgatcttgtggaataaataatgcatcaaaattccaaaaacatgactgagtaaggttaccatcaatctcactaaaacccataccgaccaatatttccttgacttcatctataaaatcgatcaaagggttctttttaccataattgagcaatggcaatggggcttctacatcaatctgttcaaaaattagatctctccatttgccagatattaaaacatcatgagtcatttttctaacaacattatcgcaggttaataacaatgaatcaacaagaggtatactagtttgcgtaattttgtattttttggctaccaatttctctgtaattaagatattatgtcgtttttttaatgattcgtatgcttttttatcttcgttctcaaatagcgattctaacgctgtctttgtattttttaatttgtccatgaagtcctcctcactcgatgatttatgcgaatcttggagaagaattaccttatcatcaagtatattaatccagttatttttcttgcagaaccgaatcgctccaaaaacttccttttcgtttcctctaaactcttcgccgtttatgatttctgacaatttgtttacccccttctttacaatattgacaagtttcctttcagggagaacaaggtgctcattatcagacatatcaggatgtaaaaagactttgatgtctgtatcctcactgatttgaatgaggtttttataccttaaccattcaacccctcttcgcacttggtctactgacaattctgaactttttattagatcagactcggtcacccattcagcctctaccaatctcagtacgctcagaagcttcttctcaatgggatgcaatgatgaaatcgatatttttgagttaccttcaaacttagatatatccctgcttgctgcttcatccttatccattatataagtagaaaacttgtgcaagtatttttaaacgtttaaactttggttatttaaagaataatttaaggatgtcaagtgaaaaggaaagcgtttcatttgagaaaagcaatatgacgttagattcgagtgacataaatattgaaaatgattcagaatcatattcaattggaatcaaagattttgtcgttaccccctgggaagtagagggagatattgactactctaagttgatcgaaagattcggtacccatgccatagatgatactttatttgaaaaaattaagtattttacaggagaaatacatccatttctcaaaaatagatattttttttcccacagggatctagatgtggttctagatgaatataagagaggcaacaagttttatctttatacagggagaggtccctccggcttggttcacctgggacatttgatgccatggttattcacaaaatatttacaagaaaaattcgatgtaaacctaatattccaattgacagacgatgaaaagtttctatttaacggtaatttggatctggaagccattcaaaaatatacatatgaaaacatattagatatcatttcgataggttttgatccaaaaagaaccaaaatcattgttgataccaaacatattaaatatttgtatcctatatctattgaaattgcgaagaagatcacttactccacagcaaaagccgtatttggattttctaattcttctaacattgggatgataggcttccctcctgttcagggggcgccgtgctttcttccatcaataatcgagaataaacctacacctgtgctgataccagccgctattgatcaagatccttattggagggtgacccgagacatagcggaaaaattgggttatcccaaaccagcccagatccatagtaaatttattccaggacttactagtgtagggaaaatgtcatcctcaaagccagaaactgcattatttaccgtcgacgatccagagatcctggagacgaaaatcaaaaatacctttactgggggtcaaccaacagtagctctccaacgcaaattaggaggaaatgctaatatttgtccagtgtattggtatctgaattatctctttgattccgaaaaggaatctcaggagagatacaatgactgtacgagtggcaatttgctctgtggagaatgtaaaggcgacatgataaaaaaagtaaaaccatttattaaagatatacaaacaaagagagaaaaggcacaaaatttgattaaggatttcatgattgacggaaaagagttttttgaagatgacaatattggttttaattaaccaaaatctttgaattcaagttgaattttaaatttatttgtcaagatagctacgaggcggaaaaattaacaagtatttttgctctgcaaaaggataatacactttttgtcagcaatatcgtaagaataatcgataatgaggttgtcgtcaagctaaaagatggttctcatcacagcattatgtttaaggatgaaataaattcatacaagttagaacgattcttcaaggaacttttgtcacgaaaggggcaagtcactgatacaaaatatgtaggggatgtagctttcataagattaagtgaacctgtaacttaatagtccaaattattgaaaatttttttacacataatccctattaaattcatccagaattagttggtagactttctcaaaatataatgtcgtcgagtatggcatcaatggaataaaatctcttatagtttcaagaaccaaaggaaccgcacgttttgataatttaatttcaaatttcatccataggatccgattctgtgtaaatacgattttttcacctaactccctgtcacaaacttccttagccttgtcctcaacgcgcttgtaccaatacgcaagaacctcggggtccaacccgccactaagatttgtaatgtcattacaataatcgagtattaaatcgtcaattccattcttcatcttataatgttaatttcaacctaaaaaatttattattgggtattaaatttatttgataaaataagattattttttattctttactatattgcccttattatctatctcattggctcttatacgactggaagaaatcggtaacccatctttggctaatttcaattcaactgaaattatatcaattgttgggagacccattcttgttctgatttcattaacttttctgcccttgtaacttgtttcgctactagctaccatacaatcaactttttcagagaacattaatggtccaaaaacatcctcaagctttgtaatttcgtactgagtggatccaacttcactatcgatgatattgactaaatggcgttttcgaacttcaaatgaattatttatatttttctttaatttttcttttactaaagtatctgatgataagcctattataacgaattttcccttctcaaacgacttttttaaaagttcaatatgaccagtgtgtataatatcaaacgtaccgcccatggccacacaatcatattttttcaatatagatgtcaattctaaaaataatataaaattatttattcacaattaaactcatggtttgacaaatttataaatacctaattgaggataaataattattgtcatctacagttgcagaatatatctgtgaagattgtggttctctattaattcatttaaatccaactacactgcagagcataatagaggttcactcacaattatgccccataaaaagacaaaaaattcttgcgaatgcagaagctgagaaactaaagaaggcatccggaacaaggaattcaaacatcccagttcaggctactcaaatagtcagtggcgctccacctagtcctgcttccataccacaacaagttatcgcacctagtatgaaccaaagtggcggcggttcatcacttccgctcactggaactggaacagactaccagacagcagaaggacccatagatactggctttaaatcaaagagacagccagcaggaaagtttcaaggaatccaagtatggggtccatacgatgcacctggacaactcgggatttggggcacggatgtgtgcgttgattttgacatttgtatttcagatggtgcctgtattgatgcatgcccagtgaatgtttatgaatggctagatacgccaggacatccggcttccgagaggaaaccatttatgattagagaaaaggattgtattttttgtttggcatgcgaaaatgtctgtcctccacaagctataaaaatatttgtgaaatagcatagtgcaagtctgaactattagatttgactatcctcttttacatatttataaatcctataattcaggttattattgtacttcatagcagtatcccactttgaatttcgatcatcatatagagctataaagtatttcttttggttgagatcaagattatgataaatgttttcacctacaattacttccccaggataagataatgatgtgattttagcagctatactgatactaaaccctatcaaatctatatgagcatgagcaatattttttccatacagtaaaacaagcgaatttccatactctataccaatcttcacagcaatctcagggattgaatgtttcttaaatacggggttgatcccgtttctcattacattctgtatatggcgtgcacaatccaaagaatttactattgcctttttttgatcgtagtctgatgggaatagaccgattacagcatctcccacgaattttagcacataccccccgaatttttcaatagataggcttacctcttgggaaaagatttggataatcagggccaaatctagtgatgaaaggtcatgagacatttgagtagagcctgcaatatccacatacataaccacaacatttgttttggtattgaccttcctttctaagtacttcctacacgaatcagtagacagatcaataagcaattctttattttctagactatgtgacacacggtcttgtacgctccttacaaaatcaaaatctcctgatccaaaatttttcatctagatctgaaaatgacaattctgcctagtttattcgttatgagcagtaattctagaggtgaatctgattctatccccataattggagtaagaacttcatacatgatgcgaaccccaagtcatagataatcaagttgacctattatcatttgtgattttgttttaataagacttgaagagaatcaaaatttcacgtctaaaaaaactgactatatgtctaataaaacaatggataaacaagggcaaataatctaaaacagtttttactttagatcattcttccttagagtaaatgatgttatcatccgaagaccaaaaattcctgcgaaaaatattatagtattgtagatttctgggcccgggccatcttcatatagactcgaaattactaaaatgagtcttaaaactgcattggcacattcaaattctagtgcaaataataatccattggctaataatgaaattgaagagacttttagttcattagtaccattatctgatataactttaaatcgcttcataatagcatgaaaaactcccatactagttgggaatttttttgaatcaacgtctaagactctattcagtagtaacattaataattgtcccatagtaatcaatatgatactaattgcggctatatcgatggcgtatatcaaaaaaagaaaaaaagtatctaatgtaagcattctaccatcctgtcagattcatacgacaaatgagaatatttttttaatatctactaacgtacttaacattaggtcatcttgttgtgcctttctatttcctttggatagtgaccaacttaatactattcgaatagtaacgattacccccaaaatcagtagtttttttattcctggaatctgcatcgtcttaattatatcacttcctatttcaaaatctaacgctagcaagatgcctcgggctaatcgtaatctgattgattccttttccattgtttgatccttaattggattcttaaggatcttgagaaaggaaattaccgccataataaccgaaatgatgataactgaagcagctagtatagcaattccgaaagtaatcaagtcgatataataagatcggattgaatcgatcggaatcaagccattcaaatcaagtatcacctctttcactggaaaaggtatcaatctatcatgtattttattttcatctattttatgttattgtataaagaacgtagtattaccaaggaatatttattcacgaaatagatcatgtttgaatagtaactcgttgcgatcagcatcgatatcaattgctataactacaggagtatctatagactttattgcctctcttaaaatggaagaaaattcacaagtactggttaccctatacccctttgccccaaagctctctgcaagcttgacaaaatcaggattgttgaaattagtgaaaacactcctaccgaattccaatctttgttttgtagatatcacacctaaatccgagtcaacccatacgacaataatgattggaagttgtaatcgtactgctgtttctagttcttgaacattcattaggaaaccaccatccccacacatcgccaccaccttccgagtggggcacgctagttgagcaccaattgatccgggaagcgcaaatcccatcgaacaaaatccattacttattatgcaggtattgggactaaatgtcttgaagatttttgctatccaaagtttatgagctccaacatcagaaatcaatatatcatctgaagaaagaacacttctaacatcatgaattaatttttcaggtttgatcggataagattcgtcatcaataaactgctcaatacgccaatccacctcttctttaattttttttaatcttgacctcgctagacttactttttgtttattaatagaatccatttgaatttcgttctggtatatctttacagaatttataagtaaatttatagttaatttcaagtcaccagaaatttctatatcaggattataaaagttgtcaacttctgcagatgtagaatcaatatgaattatttttttgagattaaatccattccaatttttagggctgtattcaaccaaatcatatccgatagaaattacaacatcagctaatttcaaagcgtgtaaagcatagtcggattcctttatgccaatagtgcccatatgagttggagaattatcagagatcactccttttcccataaatgtgttcatcgaataaaatccggtcaattctgcaaaacttctaataatatttgaagcgtcatttcgaatacaaccattcccaactagaataacaggtgcaattgacatcaatatcatttcagttgcatcgtgcaaccttgatggtgtcggacatgaatgaatgccatttttactactaagaggtttcaacgctgattccatttttgccacgtcaacaggcaaatccagatgagttgccccttttttttcttcatttgcaatcttgaatgctcttcttagaatttcaggtatcccgtcagcatctcttatagaccacgtccatttggtaatgggagtaaacatagttacagggtccatattctgatgagattctttatgcatcttggtaatttcagtttgaccggtaatcgcaaggagcggtgatcggtccatattagcacttgctacacccgtagtaagattagtggcgcctggaccaagtgttgcgagacaaacaccaaccttgttggttaatctaccataaacatctgccataaatgccgccgcctgttcgtgtctcaccaaaataaattttatagtttgtgattctgagattgatatcataagatcatttgtttcctcaccagggattccaaaaatatatttgacattttcggcctcaaggcactttacaaatagatcagaagccttcatctattagaggatgcaacatatcaataataaaaatatgatccaatggtataattgataatgataagagtgaaacatgattattctaacaataaacgatgtgaattgcattcacatctcattgcgtgtaatatataataaccaaagatcagtagaacggcaaatccaaagttattaaagtcctaatagtgatgtgttatcataatttaaagaacaaatttgtttcaaaatttaattctattattcatataacgcccttgtcatatccaaaaatttttatgaattagtcctaaaggaataaaaagaaatattattgctggaattccattgcttatttatgtcactgattaaaagtgagccgataaacaaaaaatttaaatctgacctctcaattcttagcccactcctgtcataaaaaaaggggatcgaaatcaagaatattcacatattacctaattgacttttgaatcactttatatttcacgtcaaataagaaatttacatgtcactaagtatcttgataccaatatttattggggtcgtattaggctatgggtccgcttatccgctacaggaaagtaatagtcaactttccataaatgataccagtttcctaccggatgcttcttcaaatttttcattcatgttaaacccaaatggttcaaacgagtcaaatggaatgcaaatgggtaaccaaccgtcaatgaattcatccaacttaaacgacttaatactattagaagatcaattaaagttggcccaagacaaaattgagcaagcggatattaaaaacaaggattggacaaattatacaagtaacaaactaggtttgtctttggaatatcccatcgacgttcatctgcaaaaagaggggaaagaatctcgatttgatcccgataaggatttaaaaataggcagtattgagaaagatggattcagtattagccctagtatttatggccaaaattctactgatttttcaaatgttgttctacaggcaaaagaatctcatcttaacatgaatctaaacgattcgtatctaatgttagtggaagatattacaccaatgagtattcatgatgatatcggtttgtcctacttaatatcattgatcgataatggtctagaaaaatccctttttgtatctaacaatacgttcctttctcataacgataatatttataggttcgtgtttgttaccaatactgatcaatacaataaaacgaatgcaatattcaatcatttattaaactcaattagttggaatatcaatcaggataatattagttcgacatctattgttcatgcgaatcaaagctctctgctaaataatactattactacgattaataaccaaaccttagaaaataacacagcaactattgaaactactcaaggtccaataaaaatcgagttttatcctgaggtagctcctaaccacgttaagaattttaaagatctcgctaacgacggtttttacaatggagtagtatttcatagaatagtaccaggatttgtaatacaggcaggtgatccaaacacaaagaatagtagcattagtcgagatacttgggggactggtggtccagggtacactataaatcaagaatttaataccatacctcatgaaagggggatattatccatggctcgcatgcttgatccgaacagcgcaggatctcagttttttattgtgttgaataattcaaaatttttagacggccaatacacagtattcggaaaggttacagagggtatggacattgtagataaaatagctaatgttaccactaattcaatggatcagcccttgaatcaagatttaacaagaataaacaagatatcgattaattaggaatagaccttgaacaagaaatagctattcagctaatagatcagataattacaattattttttgaaatgtaatcttagtcattggtcatgaataagattccatacataatttataaaattcttatcgattcaaaacataatccaaaattacattcgatttaaaacttctatcttttagatgggaaaatgccggacaaaatagtccaattcatatagtatagtattcattgatgtaatttcctcaggaggtttagtattgatattagtgatatgggcatttacatcacaatgtatctatattgcaactcatgaaatgaaatagatgatacttaaatcgccgaatccttaaacgttaactcgaagtttggattattttaaattaagtgcaagatgttcgacagtaggagtgtactggattcaggcatgcgaacggtacaaacagatgaggcgatactttcatgatcaatcacgagcccatatgaaatcctacctgttacagttatagcacaatctaaacaatcagagaaattactaattctcatgaatgatttagaaggtgcactctcaataccttcatcaattactacagtatcgatagtaatttcttcagtaaaagacatgtggtgatacgaatgttacctatgttatcattctgaataggataaggcctacaaacagaatgatcgatgaacatttttaaccttaactcacttgatgtcgctgacccaactggcaaaattgattcacagggttattcaatacagaccgttcattggaattttcttggtccggaaggagtgcactatttccagataataaactaccatctctagaaataacctgtccattttgtatgccgattgtgattgttatgtattctattctactccacttccattacctctttgggataaagcgccattttgtgcgtaggatgataattgaaggttaactgaaactaattcaaatgataatgtcataatgataaaaaaaacaccgttaaacttaatcttcttattgttataaaacttagaaatgaattaaaaatataatgactattgttgatttaagccttttcaaataatagaaaatttaaaaataaatccagaagtaagatataatctacttgccatagatcagaaataacgaaatgattacaaaaatgataaatccaagttggaatagtccggttaaggaataattaccattcaaaatttttattcaagtatttgtcgacaatacaataggtattttatccatatccatggtttttttaatacttttctaaaagtttgttaacgttattaattagtttaatcaatgaaaatggcttatgcataatatcatcgattttgactccggtgttcaagttatcagatacctcgagttcagaaacgtcataagcagacatcaaaattgtcttgatcaatggatcaatgcatttgatttcatttattaattgatagccattaactttgggcatacggatatctacaaggaccatacaatactttttgtaatgctctttcagttcatttagagctactgcagagtcatcaaatgtaactactttgagcttttgtaactctaatgcctttttataaacaaaaagcaaatctttttcatcgtcaatgatcgctatgctacgaccacctactcgattatatgatgttctaggagtataattgggcaatatatattataaataaaccaaactattaatgtttttgcaaaataatggaaatatatagcaattatattacttacactaagcaagaagggtaggtaattcaaccagtctatcggataataatgatgatgaagatgacaaattatgactataatgattatttaccctgatggtaataaataagctatttaatttttgaatttgatcgaaaacacaaagaatcttttttatttatatctccttgctttgttaaaattgttgttagattagataatcaatttaaagaacaaattgtatttatttagccaactccataatttcgtctgtttggatttcttatttgtaatggtttatcaccccttatccgtattgcatcaaccttagatctaaatattgtaaattctcttgtctataacaaactaatagcatccgctttgtcatcagtcattcaatcatgtttaacaataaaatagatatttttattaccctcattttcctccatcctttttttctagatttactaaaagagatagatattttatctaatatttagattatcagagaatctcaataatcatttatttgattgacaagaatttctcaacgtcatctaacgaataatgtactaaataatcctgaatacttaatacctgtaagactaaccttgctccaatatttctcgaaaataaattctcctttggcgatattgagaaactaaattcacttttagattcatggaaatatcgctaccgatgaaggtaattttcaccccacaagacgttcccgctgtgtattcagcaaaggcttccaaagtattatattaataacccctcaagtttaataaaaaacgcagtacgctccggtggtgtagaggttattaacaaaagtagccacacagtccggctaagtatttcgccctctcaaggttctttctcgcgaggaaactctcaagaaacaacgatcccgggttcaaatcctactgatttcggatatttggacagaactgtcttggcaccagataatgactatgatgcgaatcgtgtaagatcaatcatagaatatcagggtttttggattttatttgggaaatatctgagtggattcaatggccataagacgattagcagccgaatatcatatgccaagcggtattataatttactaataagtagaaactttagtgaattgcatgacctatctaaggacatcagaaatcacgtcatgaaagctttggcagctttatctaagtatttgggaatatatgataaatggaaggaaattgtaggaagatacaacctaaagtggtcatccgggttcaatggttagaggtatttaagaaaattacaagttccagcgacgatctcgattctttgattaaatcaataagaactacccttcataatgagataattccatcagggtatagaaatttgatattatacagtctacttacaggattgagggtcgctgaatcgattgaagtataaagatactcaaagatgacaaattgagggatagatatgtttccgccgatccaaccatgattaaacattacgaatttcctgacatttttatcagaactacaaagaaggcttacataagtatcataaataaagacataatcgatcttgcaatgtcatgtccaaccgtcaatcttaacaatttcagatctttttttacaaagagaaagattccactaaacatgaattattgccgaaagatatttgcaacgtatctcagaaataaaggaatagagccagaaataatcgatctcctacaaggtcgtataccccaatctgttttcttgagacactattacaggccgaatgttgaatatcaacgaataggagtaatattatcagaccttaagggtgttattctgaaggggtaaaccatatattccgagattcaagataccaatattgatctcgtttgggatgttttaacaaaaaagataagcccggtgctagatgagttgatgaagacaataatggattatatatcatcagtgaccaccatatcagaatctttaattacaactttgcatggtatttgtcatgaaatatattaacttcatacttttgttaatgtctttatcatttctttacgctctattaataagtactaattcaccattggcattacaaacacatagttggatatatgctacttcctctcaacaagaaggcaataaccaggaagaaacgcaaacttcatctgaaaatgaagatggtccagatgaaacaaacagtgaatcagaatcatcacaaggagatacaaattctgagtggtctgaaagtgatgtaaaggataatgatgtttcctcaactaaccaaaactccaattgtcccaacattactaaaatctctaatcttcccctatacattggcctggatggatgtcaatttccatgtccatcttttgatagcaacgacgagaataatattccagaaggatgtcccatagaaccagcaacatcacaaactaacactgggttctctgttaaggaagagaacccaacacaaacgccatctcaagaacaacaacagattgaacaccaaaatagtcaggacagtccaaaccaaaatgcctttgttaatcctgcaattaacagtgatactagcactgctgtttctgataatgaagcaccaacaactactcagaaatcatttactcctttgggtaaacttagaagtgggtccacacaaacagaatcaaacatacctttgctttcaaatgatgtatccaagcccttcactcctggtggtggaaatacaggtgtggagggaattccaaatcaaccaaatacaaatcctcaaacacctatagacccaaataatataccaaccaaaacagaaggtagttgggcccatctgactgttagttccaattttaccacggattataaaactccacatttcgctgtagtgtgtgttcatacctctaatccaaatgagataaaagctaacccatattgtcaaaatgttgcacttgcctgggacttgttctataccgtacaagccccaggcttagtaggaataaaagttgacactaattttgatctagttagaagcagttgtgacttttatatttatcctaaagaatccaaatcatgttttgtggaatttttcgattttaaaccgaggacagaggcaaacaaggagcggtcgtttaaagattgaacctctgaggagaaataatcagcattagtattacttgagcggtcttgatccctgaccttatgaaattaagataaacaggtgttattgttgtaatggtttcgtaacttatctaagtaacaaaagaatagagtcttaaattattgatttacttcaaggaaggattagtagttctgtttttgtttaccattattacacaccagacataaatgaaattattactaagatgataaggccggtgtcggatgaattacagaaagaattactttcttgattctaaaagttccattcagataaacaaattctttataaacatctttgcgtggtatttgttatgaagcgcattattaatgacgcactgtatgttttgacagttacattcctattttatctggtgacaacaatgaattcaccatttgtgctgatttcactagatcgttcttatcccacatcgtttagtcctgcaggcaagtataagccgggatctggacaaacagagctaagtattcctccttcatcaaacgacccggccgttccttatactcctggtgctggaaatgctgaaagcaagggctcttcaataatacctaagaatgataccgatcctcaaacgccgatagaaccaggcaatataccgactaacataggagatagatgggcgcatctggctgtttatttcaccactacctcaaccaatcctatgtattattgtattgctacatctgtccccccgcactatactaattataaagccaatccatactgcattcagactaacgaggacacaagcactcttcatttgcttcaagcacctggttatctaaacgtgtctgttggaggatttgttggtaatgtgggtggtaattcagattgttttttttatatttatctctaccaatccaaatcctgtaatatcaatattattgattatgacaaacaatgaagttaactaaagaaattaagaccaaaagagaccgtaacgaccaacttattgattttacaatgtatgaaatgctatcattttattcattttgaagatgaacccgtagagtctgaaattaaatttaggtattgcaatactgataagtatattacgttatagtattatctcatagagttccaatgtggtatcaacatttgcgtttcttttttcttatcggacgattcaataggtccatatacatcttatcaaagaataagtaggacgttgcgtaaccttttcatacaagaaatactcttgttcatgatcgcattctaggtctctttaccattgcggtttttgcatagattatgaacttagacttcaacatctaccattaatatttatgaactgaaatctggaatatattagattttgtgattgattattttcgttcggccgctccaaaggaaaagttgaacttaacgatatattacttttaatcgttaggataatccagaaaagattcttatcatggtgtttgtctgtttttagcgtccgaaagaagaatatatcatgatattaagacaattatacaaactccaataagcattcatatattgaaaaccactatagtattaggggtaaacagattgattacaccgttctgaaagaaccgtcgaaaaccttgaatatagataattcaatgaactgaattttttgattggagaaagtttcaccaatttttacacttagtggcataagtcgtattcttttataagcaaatttgcttatattatacgtggatcattaaatgaaagactcggtgctatttagaaatataggaaagttctggaagaggacaagcaataactctgcggcagacaaaagtctgatagataatttgaaagaggctgaagaaaatgccgatataaaggagaaaacgcaggaagctagtagaaagcggcggttattcttccgaaagtaaagtcgaaattaactagaatattagcaagaatttgtactgagtagtacagaatttttaatcattacttcaaatacttgtcggttctgcaattctgacattgaatatcgtaaccgatatctctatttgcaaaatgtataaaggtattgcaattgcgacaatatgtaaagactaccggatgaccgtacttgtctttagcatctttgatttctttagttagttccatgtaattacttcgcctgtataacattcaaccgtttaattcaaataattaaatattttggattcagtggtgatcgttatttgtggctgtgattaatacttgattagtattaataaatccattatatgaatcgtatatttctgaggtaaattgctcatatccaacatttgacgacgatattaagatcaaattggacattacaccaattgattgattattgttactatagtttgattgtaattatttgatttggccactacatagaaaagataataaactatagcaagaaccttgctgaagtaacacaataattcgatgtattatttgggatcctatatgtccttgaatccgaagccggttttctccagcttgaaaaagaattaatcaatagttcgtagaatctctattttaagttaattagatattatatgagtaaactattcttttgaatattgtcttatgactaattaatctaagaacaaacataattaagttgattataaatcaatatcaacgattagttgctggaaattatagagttattgttaattacattgacctattattgtttaaaaatgggtgataagatatttgatttacatacgctagagattaagctatttaatagggccgctgaaacggcaatgaatatttcaaataataattttgattggaaaagagatatgcgatatactacctacaatacgctttcttctgttattcgttttgcaaagctatctgtcatattcagagatcaatatttggagaaggacgaatggtggaatcctaactacgacatttacttttcatatctggatcagtatgacggtagcaacgtttatgataaagcaacaatgagatttttacgccgtcaaacaatatccaatgattttattaagactatgatcgtaggattatatgcatcatctttctcaattttggatagtcgtattagagttttttataactatttactaaatccatctgaaaagggagaaacaaaggagggtaactttagtaaacttatagagggaatattagatttcttgaatttaaattccaagagtggttgtattgaattgttccgtaatgcccgaaatactatcctcaataatggggtatataatcaagacgaggatactgtcgattgcggtggaaaatcatacaaatttgagaaaggtaatccaccaaattatggtgattccctagacctattgatattgacaatattacctgaagttctagaaatattggataagataatctctcggttgttggttgaacggatcattctggacccctttgcgaaagaaaattaacaatagagtacggtcattattgctattaccggtaggaatttggttttaatttgcattaacgagattaatatttacagtaataaatactttatgatatagccttgaatcactcttgcactacagcactaatatcctactttagaacaaatccggagatgtcgatgctatagaccactggtattagaatactataaaacaatatagctctacagcggccgaaacaaatcaacattaaacgtcaatctaataatgtaaactaagaattattctggtaatacaaagtatcatttaaaaatttgttgatactatctatgataaaaaaaaatgaatttatacgtcagctatgcgctagttacttgcatctagattcataatttccgtcagaatcatatgaccacttgcagtttgtatgtccagatgggccattctcattagatccacctttagaatcatattcgccggtttcaggatcgtatgtgtatttactatgagaattataattgtagtcttttggttcggcgcttacttcttgaattattatagcgcttaccgtgctcacggttgagattatggcaatgattgccaatcaatgtatcaacatcaaaatatcataataaggagaaatataaaaacgttattgaatataattaattaagaatcgtttattattaaagaattaaagttattaaaaaaaatttcaacaaatttcaaaaaagttgaatttccaattgaaattttataaatcacagcaaatgacaaatagtgatatttcatcaatttggtgagtaacggtaacggcctaccaaccaacataaacgacaatgtgttctcaaacaataactataatacatctgtcccagaatggctatacgaagatgaggacgtatcttaattgttgtacttacaaagataggttacacttttagttacttacacgggttacatcatgttgcttagttttcgtatgtatcgcggatataattaacctttgtagaaacttctctgatgaagtgagaccattaattccaacgtgttctcttgaatcgttatatgatttcacaaacatgtcataccttagttaaccttattctaaatttgggatatcttccatctttagaaactcattccttactattttgttatatgcttctatctttccttgcatctgtggataaaatttaggtattggtttatccttaataatactgtgtacaagaaaatgtttgaatcttttaaatataaactgctttccgttatcatgcatcacagtcttgggtttaccattgaccattatccaatcctctagtacatcgattacgtcaatcgatctttttctttcagaccatctgcttgcagctatcctggaacaatcatctaagcaactgataaatacttctttgcaccagaattgttaagatagaatggtcccagaatgtccgtctgcaccatatcattaggatgttttatggcaaaccgcttatactttcttctattaaattgtcacttggggatgttaagaccatgtttctttagtaccttgtatacggttcttgtgattcatgacaatccaatagttctttttagtctaaacctgatcttatagcaaccaaatttcttggttatcctaaaatcaagtattgtttcttctactttagatgtgatcttcttgtacttgatattgtggggtctttcacagagatctgatagtccatctatccccttctgactgtacctgctcttccacttttagtaactctttctggatataccgtatcttttgcaaatattagatgcagtatcaccagtccattccttttcatgcattagattaaacctgcttctttcgatttctatatgggttcacttcctgacacaaccacaaaagtgtaacccatatctgtaagctataatgtcacctatatctgaacttgcaacacttagtagactaattcgtttatgaagacctctttaaagtgcaattattaccaagatcgaaataaatgtcagttgtttcgcaaaaattactgctttggaattcgatcgttgttagtaatactctcgctttggagcttgatggggccgaaaagacaacatacatccttgaatcaaaacatgattaaccctgattagcagaactaatgaaacgataaaactttctgataagaagtcaaacgttacttaatcttcaatttatttaatatcaaaagagaatagaatggtcaatacttgtcaagattaacacactcatccatggttagttgtccaataaccttagaatcagtcaagtattgggtaagttattgataatttggctaataacccctgcactcgatataaaataaatagtcaccccatcttgatgacccttccgcaagttcaggtaaactcgatgttattgactcggacctcgtaaaaaatccaaatgcaaatatgtcatcatgtctaatgaggtgcctcatcacagcgaaaatttggttgaatgacatatgatctacaggttacaaccttagattattaccacaatgaatgcagtaattatccccctatgactatggcttttgcagcggccaaatttattcatgttttattaaatcatcaaatagttcagcattatggaattcagagtagactagtaatatatggacatggtaacaatcaggacacatattcaatatattccaattaaattcgttaatcagatacaaaccagaacgcaatatttaattcttatataaatttgatctataacaaatttatcaaatagatattatacagaaatgagattacgattgtaacagaaatatgcatagtgataattcaaatcgaaaattatctgctaaatggttaatgttactatccttgatacttatcgtatctgtttccatgtttagttcaccctcattatctagtttaatgtattctctcccaagtccctcttcacaattaagattacaacaggcatttgctcaaaatggggaggacagtagtgaaagtgatagcagtagtgaaagtgatagcagttctgaaagtgatagcagttctgaaagtgatagcagttctgaaagtgatagcagttctgaaagtgatagcagttctgaaagtgataatccagtctctaccgacgccacaaactctgcaccaccaccaaccagctcagactctacagcctcggcggctactgatccatctttattaccatctccaataactacaatcccacctacattacaaaatcccgctactctaaccgataacgatgacaattcttcgtcctcttccccgaatgataataatggagatcaagaactggactgtgacgatatatctgatagggacttcatagtatcatctggagatccaaatgggtttgatgaagacaacgatggaataggttgtgaaagcgatgatggaaatagtaatggaaatgtaactactcctactcctgaggagaatgaagaaggaccggatggcgattgcttgtttaatcccgatttaccaaaatgtgcttctgttgatggtgaatgtcctgatggcttctttcaaaatgaggatgaacaatgtgttccagatcatcgtgacggctgtccggatggatatcattcagttgatgatgatgaaactgggcgttgtattccaaattccgacggttgtccagcaggcatgatctttagacctgaccagaaaacctgtggttacaaggacgatatatgcaaacaaaatccaggtctggatgattgtgtagaaacacctgatgaatgcgataataatagagatgacgatagtgatggtttaactgattctgaagatccagattgtgggcaacaacaatgcgacccgtcatatccaaataattgcattccctacccgccgcctgatctcgactgtgaccaaggtggagaccttgaggatgacgagattccttatcacaacttcaaggtaaatgggcctgacccgcacggctttgatggaaatgataatgatggtattggatgtgaaacaggtagtgatgacgataatggaaataacggcgattcagatgtgatcagagcctcacaagatacttgcgatgatatctcggatagcatagacttattccctggccaactagattctgaacgcgtaaagataattgcatattttgaggattgcaaattagatcaggcctcattgaagttaaacctggttggagatgatgatctcaaactagtggctacaacctttgaggatggtgaatctgacgccgtcgaggttgaattagagtctgcggatgacgagggttcttcagataattcactatatcaagcaaatatttctggaacccaggaaggattagatttagaaaccggcgaacctagaacaatcgacaatgtaaacggaatagtattatggaataatggcgatgatccaatacaatttgctgaaaataattccatagaatttgacattgatttcgactgaagtataatctgatgctcaggccatctatcatcattatctaatccaatttattctcctttggaataaaccattgagcggccgaaacaaaatcttctccaatgattaataataaattagttctacaataagttgagaaaccaaaaaaacttaattgttctagatctgaaactaatgatataatgttatccagatctgagctttcgtatctacaaggggaaaagaaactgacaggctcctatgaacgaaaaatccgatgtatcataagaaagaagattaagattttgcaaaaagaactaccttttatatcaaagctttttccaattaatcacttagcgtttaatgaagttttctaaattcagaataactatgtgtcagatactaaattaaaatcggatgctactgaatttagtaatgccaaagatccgaaaacaggagctaccaaatttagtagcaggggtaaagcagttgaatcttctgaaactaatgaaatacatatacaagaaaggaattttaatagcccttgtagaggtaataattaccattcaaaggttaatgatgacgaagcaaatgatcaacgaacaaagtattatattaataacccctcaagtttaataaaaaacgcagtaggctccggtggtgtagaggttattaaccaaagtagccacacagtccggctaagcatttcgccctctcaaggcgacgatcccgggttcaaatcccggccggagcatcctctgtttggaaaaagaaggccaatttgaggttcttttcatgatctctgttttatgagaatctgtatacagtttttcatttaacgtatacagttttttgtcgtagtgtatatcgcagcttaagcatgaataaccaatctttttgaatgatccgagacttccaattctgacatatgtagaatttaggcctctgttacagatggtacatgtggtcatagaacaagaatatttgaggcaattggatttaaagcttttttggatgtatccaatggagatagtaatggtgtcgtcatttgagagggcgaaatgcttacctggattgtgtggctttcattactactatatcaccggagccttcaattacgtcgatattagtccttgtagtgtcgttttcattctattagatcaaatgttatttagtgaactagtctagttagtgcttttatgacaatgaagaggaaatattgtcgttttgacttggggaagccccctttttgtatgctattcaaacatatgatcgtgacatctctaataattagatttgatagcatttagaattctttttgcaaaacttccagcttgtgattaagcagtctttgataacatgaaatattagtctatagaagatctagaagtgagctccttcacttgtgcatttttataacaaatgtatattccacgcaggctgtgattagagaaaaataccagtggagggttggtttaactgatcaagatatctgttaccatataaaaaaagttggtctagtattgatattagactccggttccgtcgtcgctccctccgcattttggacagttagttccaccatgtccctggcgcttgccgtcagaactttcttcaccttgttgtcctttgttctttgattcagatatagaattaccggcataagcttgttcgcttatagatggcattgcgactagtcctactgtcacaatagcgatgacgactactaccgctgacaagtattgcttgtgttgcatatttcaaaatcactattggtataatttaaggttttaagttttgaagacagaacaatatttgtagataattggaaaccatctttaaatcctcataggttagaagtatggcgggccgggttcatggcaaagctttgcttgtaatagtatacgcatagttacactgcgtaaagcataaatatttacaattacatattcaagtcatatgggtcgaagtattccttcatttagacatttgattgaaatagaacgactgaactggtctgaatttaagaaagaactaccatccaagaatgagaaagaagcatttaacaccatatttgaaaacgccaagttatatactcaatatctgtctaatgccaacagaccaataccaatagagcctattatgatgggtgctttgttccataattataagacacttttgaagttctgtaaagaggaggttaatgtcactgaagaatccataaatcagaaattggttgtattggataaagagaaacccttagcaaaaacattgtttgacaaaacttgcgaaaggtggcgcggtctgctatacgcccttcataaagacgatagagaacagttactaaagatggtagctgattgttgtaatagtttggataatggggcaatggctaggatgttaatcgactcagaatcatctatttctgtacttttcttttttagtttagtcttgcagaatcaaaacctgatgaacagaattaaaaagtcctcggggaaaagtgctataacggatgttaatctgttagactttatcgattgaccataatagaaattgtttaaggcttacgaaatgattttctggatttgtttttttattctaaagaatactgttgaaattgattagcgttgaagagtgccgttgaaattgggttggccaaaaaaaagagaatttatcagcaattagttaaacccgccggttacggtactggattgagagattgctgatgccaaatggttatgatccaacgttcctattgctgttccaacagccattgttatcgctaaccctatagcgaatacagctagctttgggtgcactaataatacgtttagcagtttttgcttgaaagacatatcttatcctagagagaacaatatcaaacataaagttttatgactattgaatatgaaccccatgactagtcaataccctcacatatctgagattttcatgggtgagggggccgccatttcttgaactcaatagattcattttttgattgtgattataggtcttgcatcaaggaataccaaagacgtgccgtcgccaaaactttgagaaattataatactgattttttacatccttcaactaactgaatctttaatatatgaaacagtttcgtttagatgtcacaaaattttttcaaagcgatggaatatttagcagcgagcaacggaggacggattcaaaaatggttgttgacattagtgaatttcaatagcatcaatctgatccattcgattgtgaaaaatagtccggaaaattcttcttaaatattttccatattcggaaatagatttctttggactcatcaaaagaaaaagtacacatgataaagccatcccatgccgtcaacccattttgctctacaagaaacgaagtaatatttacacatgatttttctatatctaggtagtttttcactttcaaccttttttcttctagttgtatggaaaaaatggagtcttccaattcctttaattctttaagattttcttgtattcgtttgtcttgatagatgtcatagaataggcgtgttttttttgaaaattgtggctcttcgtacgatgaatctttttttacttcatcctcatatctatacaattttggatcctgggataaaaatacaaatgtaaaatagtcaatgctaccatttaaaattgcccaatattttttcatttctctcacagaagttgaagcttgcttcgctttttggtactccagtctaacgtagtttgggattttacctatcaaggtatcgtggatttgtgaatgatcaaaatttagaatataatattctggtctacctctttgtttttccagaatacctgttgccaatttatgcttaaagagacatccttttttgacaaacagatcaagaatttttcttagttcgtttcgatgtatacttgtttttttatgaatttgattgtatgtaagtggcttgactgatagttctcgaattatcttccattgggtcaaaaaagatagagtttcttgataatttcctaaccctctatgaccctccaaaactttgataatgtcggattggtacgggggttcatcggtacgggggttcaatagttctcttctactcattaattggaataaatatattaaatgaattattcgaacaattcttcaaacagcagaacaagatacagcaagacgcaaaaacagggcccctcatcagtatccgtaatcttacccaaaatcatgactctcgacctaggaatccaaaagggtagctatgtcatgatctcccaaattggagatgagatcagaatcagaaaaatccaaaaaaaagtagatgaaatgtataactataaccaattcaacaacaatctaagctataagaattaccacggctcattcaggaaggatacaattgattacaatgttggaaaggacagactagagccgggggataaggattcattaactgaatattgcaccgacaaatttaaacacattctagaaaatgaggactacatacatgtatttcagataccaaaaacatttttgaaattttttgattgtagttgtaaaagtgaatttgaagaaaaagttctcatcccaatacttaggaaattgtgtatcaagtacggactagattttgagcaagtacaaacgaagatttttgaaaacgaatgtatttcttacgaggaggattttaattgatatcctctacaaaagatatcgacttttggttttacaccattggagtgaacattatcccagccgtctctacgaacaaaatacctaaggtgaaatggacagaatggcaagacaaaccaattccagatgaagtttatgaagattggaagaaatctggagatttcaatgatggctgtgctataattgcggggatgatctggcgtggcgaatacaaaggaaaatttctaacatgtattgatattgacaatgccttagggattaaagaattcctatccaaatttggtaaagtggatacattagaaatgattgcagaaaagacaattgtggaacagcatcttgatgccaaagataaatcccacatatactttatagtggaaaaaccactctcaaagaaatcaggaattggcggccccaacaactttggcaagacagatataccagcaatagaagtaaagtcagaaggaaagcatgggatcattttttgttctccctcggtacacaaaaatggtgccccctatcaaattataggaacctcaactccaaccgtattaaacaaagaacactcagtgaatctcgaatattcgattgacgagatttatgaagattttggtatagcgctacctagtgataacaaaatcgcaatcgaagaactattcaaaccagattttgaagtacgtgaaggaaacaatagacatttagtattaatgagggtcatggaatcactaatcggcaagcttagaaacatttactctgaagagatgattaagtgtttaacgatagaatggaatgaagaacattgtaagcctccacttgacgataaagaatttgagaaacaatgggattgtgctaagaaatacattttccaaaaaacgtcagatgatactagcatatcaactgcagaagatggagaaaaaccaactgaaaaatctatcgtgaatattcctgttctactagattccattaagaaaagatggattgaagtattcaaagatcagtttagtcaatatcacataacaattaaggtgaataaccatatcgaatgcattcctctaaacagcaacagattcacagggattgttagaaaagaatactttgaaaaagaaaggaaaactataagtgatgacaaactagatgcaattctgaaacttttagaatcagaattgatgtttactgatgagttaaagaagatcgagctaagcttaagagtagcagccagaaaagaagaaccgaatgttttctattacgaccttacaaactcagagtgggaaattgtcaaaatatcatccaaaggatgggaagtaatcaagaacaacaatttaccgctctttaaaaggtatgaaggtaattgcagcccgcaagttacaccctcctcatcattgcaagataacaaaaaaggttttgatcaattctttaaattgtttaatcttcaatctgaaagggacaaaatccttctcaccgtatatcttatcattctgttcattccagagatacccaaagttattcttgttgtaaagggtaatgggggcggggccaaaacaacagcctttagaatgataaaaaacatcgcagacccttgcaatgttgatgatttctcttttagtaaacaaatcaatgatgtgattcaaacattagaacatcagcatgtggtattttttgataacgtatctcacatatcagatgaaatgtctgatctgatttgtagagcagtcacaggatcgggctttagcaagagagcacactatactaacgatgaagactttttgtacaaatttaaaagatgtatcggaatcaatggtattaatctggctacaacaagacctgattttctagacagatctttagttatcaagtttaaaagaattgaagagaatgcaaggagaaaggaagaagatatcaagaatgagtttgagagattacgaccattcgtattaggatatatctttgataccctggtaaaagccctaaagtacaaagaggaacacaaagaggaaaagatcctcaagaacggatttccaagaatggctgattttgcagaatggggcgagatattatcaagatgtgtagggaatgatgaaaacgagttcatagatgcctatgaagaaaacagattggatcaaaatgatgaagtcattgaagcatcgcctgttgctgaatcaatactactttttattaacgaaagagacaagggtttcgtttgggagggaacccctaccaaactacacaatgtattgacagatatcattgatcagataaaaccagaactaagaagaagcaatctatggcccaaaggatcgaacaaactaacatcaaagattaatgaggttatacccaatctaaaggaaaaaggaattgatgtcatcacaggagaaaggaacaaagagggaaataggattatacgaattgaaaaattgcgaaatagaagaactaacctagtggaagagaataaagaatttaatcctaatatacacaggaaaagattctcggataactttgaatgtgacaaatgatcactagaaggtgacattcacctaatgaaggatcatgtatgtttgtgaccttatctttgattcatattcaatagctttttgacaattgttttagaactgtcaaagtactgtcaaatcagaatactatatttttaggcctattttgtgctcctttcgtttccattagtaatatcaattgacagtttgacagtattgacagtagttgtagatagacggccaagttttgagagttcatatgaattattaagtctaaccctaaacattgaatagataaagtatcaaggctaaccctcgcaatatttttgaacttgtactccaaaataaaagaatgggagaattcacacagaatttactgaaacttactgaattccccttttcatattcattaattacattacttgcgcttatctttggtcatggtatcaatcttatcgaaccaaatttaggagaaatcgccccccttctagtccttatgggatttgtcgctacaacactgtcaatatgcgatccacttggtgctttacaaagaatctacttaggaaaagaacgattcttaagtgggggaaaattgataattaaatggaaaatcaaaccttctgttcctccacagtatggtccaatttatggtgaggacgatatcatacacggtcttataagactaaaaatatttggaaagagtatacagtcaatcttttacccaatatacctattcgcaattgggtatcctcctagactcgtaagagaatatgaaatagactgggatattcttaatcagtcagagattggtaccgatattttagggaatgaattgcagaaaataggcgcggatgagctagaaaggatatttaagacattggaaagtttgagacaacgagctgtcaagtcaaaatggatatctgcggagatagacagaattacaggattaaaatatatttcgcagttgtagtttttgtgttcatcatagctattgtttttcttccaggttttttaagcatatttgcaaaggttttcatcgatactgaattaactaaaatgataatcatcattttttctattttgacaatcggtgcggtgatattgatgatatgtttgaggatgggaaaattaaaggataaggcggtaactgttttcaaatatttaaccgcactggaaaccataagagtcgatggcaaggatttcaagactactttggagaatataggacactatttggatgtaaatgattggatactagctggatattggttgtctcgagtcatgagagagtacaaagagatgtatgtttcagaagcaagagaagtttaattttcaacctaaacttgcaaattgttcatggactgactagatcatattgtatcgattcgtttttccactcatttagaaaagaactgtcaaactgtcaaactgtcaaatcgaagaaacatgtggtaacaatttaagcacaaaaaaggcggaaatataacaatttcaaatttgacagttgtttggacggttcataaactactgtcaaaaaatagatgattagaagacatgaagagacagcatagatgaagctccattattaaattatctggcttcttgatgattagtagaaatataggtttagtactacgattagggactccccacctaaaggaggctgaccaggattagggtgttagcggattaggcgagctgaccaccaaagtaagtggagatccctcagaaacacgattttgtgtagaaccgcaagaaagtttaatattgctaaaatcaaacccgtaaaattcgcaatcaccggcatcactgacaccggattcgagattcacattaaatgtcgcttgaattgaaatatcatctctatatttatcacctgactcatcgaaaggattcaatatgcctgatacatcaagacgaaaatcatttccaggtggattccagccattttctccatcttgtaacgttatcactatttgattgatctgtcccggacgtcctggtggtccctcggggcctggttcaccttgaggtccttgtggtcccattggacccaatgcaccctgtggaccttgttctcctctttctcccttcggaccagcagatccaatatcacctttaacaccctgtagaccttgagggccagtttctccttgtggacccatagcaccggtatcgcctttgtctcccttgtcccctttaggtcctttaattatatcaatcccgggaatagaaccaatatcaatacctctaaatgtctgtgctagcacagattgaatttgtataacgtacacaattcctaataacaacacgaatgatatcagaatagttgtaatgaatttcagagacagattaaacagtcagaatatatttgaatttgaaaagaattctaataaattgtgcactagttaaatcataagtagattttgtcatccgatactgaagatgtggctatttacgattaatgagatgcatttcaatgatatcaaatttaagctataaagaaaatttgatcctaattcctagtggatttgctcgtgccgtcgccaaaattttttgaaatttgataatggtaatttataccaattttcttaacgaaaaattcctaaatattctataaaagctaaatattagattaatgttacggtatgatgtaatagaatgatgttgaagattattgggttaatagcggtggtcgcaatcgtaatgatggtagtagtggttggggcggctgaaggcttgggcccccaactgaatatcattatggcacaacaaacatcaaaccaagactggaagacatattataatcccgaatacaaattctcagtagattatccaaactttaatggtaaaaccaatgtaactgataccactaacaatcctagttttgagtttaaaaaaacattctattcgcctaaatatgtgggttttgtagtggcggcaactaaatcaacacctcaaatagacccacaagaagcactggtagtagcccttcaaaacaaacctccccatcaccttttactacacggaggggtattttcagtaattcaagatgaggtaccgggatatgcttattctgtattagtaaatggaactgcaaacatgatgactacactgagcttcaaacataatggaaatacatactatttcataatcagtggtcttgacagagatatgcaaacaaaagggattaagaaagttgtagactctataaagttttttgattagatttttgtataaaaatccttagctttgtttcttcttcaacagactaggtggaggtgatccaaagttccagttgtctgagttaggtttgaatatttgttgttgcttctgttgatgtgtttgtttctcagccatatgtttaagcttgtacatctttctcaagttattcttgtcttctacgtaaatctcacgcttcccagtttcagggtcttcaatatcccttggcttcataccaaaatcaatatgatccatgaatatttctatggctctgaaacgctgttctctaacataccacaagcattcttcgtttagtctgaatggttttttgagttttatagtattggggtcctgaagatcattaagttataaccattggacaaatcaatgaaatagcatatactagcttcttacaccttgaaacattaagaacacttaatggttttaatggcatttataaccatttatagggtttcaaaatttgcctttaaggggtatttttcttacaatacttttccatcttgtttctactgcacactcaagtatccaatattctgagtctactaatcattggcggccactaaacattcgtccaagatctatagaggtattgaatgttcgaggtcatcggaaaaatcgttaatgatgaacagaattatagccaattgaaattgacaaaaagtgatagtcaaattaactatgatatttttagcatccaaaagaatctgcatatcatgaaagatttcaaggatatgactctcgaagaaaaagaggaaatacttgaacagataagaaattttcctgagcataaaaaagaggacggcggtgactctttcgatctattcaatcaatcatttagtgaaatctcaaagacctggtctgattcgttaaaagagtttgaggctctttacccagactatctgaaagatgagaataccaatcccctcgaaaaatatgaatctaggtggaccgcaaagattagaaaaaaacttttttaaatgctcactgctcacatttgaatagtacggctttatctgacgagactacaatgccctatttgttattctaaggtacttttactacatctacttaactactacaatcgttcttgtctaatgataccaaaccacatctattatcattaaatactatcttatacatacaaatttgcaaactcgtccatcaaagacaagtttcagataactcctagaatggggaagagagataggacatctttttctaccaccctttctagatgtcttcataattctgttcttagcctcattaagagaatgtttcattctattgggacaatcaggtttgaagagcaaagcacttttgttaacctgtttaatcaataaaatacaaatgacgcaaatatagagtccttgctcagatcttttggaaaaaggggggcaaccccctccaaattaaacacaacagaatcagaacaatggactagatatactaaccctcaattaggatttcaaacagattattcagaaaaagattaccttacatattgcgggggaccgttctacgatttaggtcttgttgagcccagatctatatatattagttcgagaacaaacataaagttttctagctgacaaagatagtgaatcagtaaggtagtggtatttcaggttgtaacgtgtcgtggtgatttagacccgtcgagataaatggtatcaaagttattgctttgattgtttacacttttgtcctgagtcactctcgcagaattcctttgctaactggtttatgttatctccagtaccttccttaagatttttacaccctccagtttcttttgtacatgctatagttctgtcgccacttccatcctcactcacataccttttagacttcaagtcacggtctgcaaatactttttggcttaagcccggtattgccaccagtcccaccgctacactggctattacaactactgctgttatcataagttgtttcttgttttccatattccgaacacattgtcagcataatatataagatattgagttttgaatatataatacaacatttgtcaatactcgataacaaatctgaaactttcacttgttaggttatatggagcggccgcacctcaaactcaatgttgatatttctgtcatgaacatttagatgttaaatagcaatatcaaagataagccgtcgccaaaacttttatgataattagaaaaagcattaatccctttttttgtatgaaaaaatttcttgattctgagaatagtctctgtaagctaaatagtagggttatctaacagaagtatgttgctctataagctccttggtttggtaatgacggttgttatggttgtgggggtagcgactcaccaaaacatatgctcaaaactggaaaacattttacaatcctgaatacaaattttcatttgattatcctaatattcaaactacaattactaatcagggaaatatatcagaattctataaactgttcgaaactccaacaatcaccttaaacttctcattgagttttaatgcttttatgggtttaaagaggataggatctcgactatttacggctttcaaacacttttcgaggaaagatatcaagcaatcggctcacaaacttactcaaattttattccaaaagatccaagacgttttgaaaacaatataaaattgaaaatactataaaaagtattgaatatttttacaattttataaaaattagcaaatcctcgctaaactgtgattgaaagattagactcggtatcttaatagatttgtctaaacaatggtcttaaaaaaagtagtatagactttcctacttaccgttagttgtttcacagtctataccaaagtctggagcgacttgtttacataattgttgattgtaaacaccgatttgtgctgtctctctatgtgtattaggactagaataaggaccatcacatccatactcaccatagcaattctcatagcttgttgaaggattttttccttgtgtggaacaattttctgaagtataaccatcaccatagtcaaaagatgtacatttctttgcgtatgccggtgcgtttgacagactcatcatgctagttgttgttacagatactactagtattgcactaatggcaataattgccaataatatgtttttcattgaatgatcataaaaaatattcgttaaaaatgttttttcgaaagaatttgtaaaagtttaataggataattttagctaattatattttgtccaagtattagattatagctaaaaaggggaaaagaatataatgaatcaaaaaacccaaatagcaaatgtcaaaaaccgggtctttgaagtcctgagacttcatgtaggagtcaatatgattcacgaacatttcaatagccctaaagtgttctcgcctcacataacactagtattcatcgtataatctaaagggacttctttagttttacaggttgggggcccggggtcatgagggtagtaccattagataaccccctggatagaataaattagattccaacaccttgaaacattaagaacacttgatggtttataatggtatttaaagccatttacagggtttagaagttgagggataaacagaggagaatttgtaatattatatcaatatgacatcaagtatgaatcactctgattttctccattcatctatattcttttgattctctgccatgatttgtccaacggtttgttgtttaagtatttttttggtttgattggggcgactgattacgggtaatcctgacgattctacaagtccatagacctcattcattcgttcatagccactataaaagttggtcatataatgttaggtacacttaatcgtcttaaaagatagtggagagtccttttacattgttggcgccccacctcttttgtaaaaaaaattcatggcatttctcaaattagatcgaccgctaagggggtaaatttcttacagcacggcatagatatcgacatactagctgtaagaaaaaacacccccctagcaattcatctcctaagcaagtctgttagacaatggccggccggccactaaacactgacccaagatgcatagcgatattcactgtttgacattctcgaaataagcagtagctgttgaacctgatgatagctgaatggaattgacaaaaggctaaggtcaagttaactacaatatttttaggtttagatagaatcagtacatcaagaaagatttcaaggatatgactctccaaggaaaagaggaattacttaaacagataacaaatcttccagataaatcaaaggatccaatattataattagcacgacaatatcagctattctttctgatttagtagaatacttttttagttaaggtatctaaaaacagtaaatccttggaaattcctatatactcgaattcaaaaaaaattgggtgtagtttaccttccgttactggtgctacaatcaatgccttgcttttgaagtacctgcttacaatattgttggttatctaccgcgtattgtgctgcatttttatgggtagtaggattagaatcagagtagcatccaaagtcatcataacaaatttcactctctacggatggagttttaccttggttagaacatacttcttggctggcatattcataatcaactgtagtacattttttggcgaaagccgattcatttagtgaagttcccatggacattacagagagggttaatagtgatgttatggcaattattgccaataatttgtgtatcattgaaacatcaaggactattacacataaaaaagttgttttgaaaaaatctgcaaaaactttagagtaaaatagaatagttttttgtcctacataaatattagccaagtcgtcactcaaaagattagacttattcgaaatatccataatgtgatcatctcatattgaatgaattatgatgaaatcattaacttcatttatcctcatcttaccgccctaaaatatttcacaagaaaaatgacaaagtgttccccttttttgcctggaagattatgaaacctgggataatactacgttgagtagatcgctcgactgataccaatgtcttaactcagataaatatctttaatctagagaccagcaagatcttagattaataatgacgtcctattacatataatactgtatcctacagttccgaatcggccaggtatttctaattgtaattgaaggtatgtctaggtgaatggcacccgatgacaaagggaataacagcaaaggattaaaaaatagcgtcattcgagtaagtgtcaattaacaatcaaatcatgcaagctagttaacttttctctgatctgatcaaatttagacatgtctggtcggtagtagtgtcttacaaatatcgaattagctattctaccttgtaacagatctatcaactctgtctctactccttcattccttaagaaggtagcaaagatctttctacaataggacatgtaaaatttttgatggtttcgttcaaaagttaatctaattttgtcataattcaaaacttcatctccatgttctttgacaagattcaatatatcctcattcataatcgagataaatgcctttttggttcttctcaaaaatatggacggaaatcgaaaatgttctaaaacttttctgtccttagagagatattctttctgtggttccctaattagaagtaaattgaatgattccaaagtttcggccggccgcaaacctgtcaaaaccccaaattttatgatatttgagaatcgcggatatttttcaattgactttttaacccagtcggccatactactgaattcgttgtctagattcgtcaagttctgaaaactcgtgagcgagtctctgcttacggtccatttcaactgatacctattcttgtaatcttgccacctatcgtaacaacccaaatatttcgacaacaatgccaatgatttcattatatgcttcttcttgtcattagaaaactccattatctctgagaaatctcctgttaccaacaaatgatcataccttcttgcgtatgccatcctagttttcattgtcacacggttcagaccaattgattccatgtattgcaagaatttatcataatctatatgtttttcgtcgttagagttactataatcgttaatttgtcctctcaaggcgacgatcccgggttcaaatcccggccggagcatcctctgtttgaattcttttaataatcaggactgtctatgctacaaattatcaaataagggtcataaaaatgaaagaatcgagttcttagataacaacaatactcgtaaatcagaaaatcataatcaaatcttaccatattcagtaaggtcagccagggacgatttttggaatgattttaagacctatctaatcaatgaaaggcatagtcaatctagcattagagataagatcagctatgctagacgattttaccatatacttgaaagtaatgatgcttctttgataacaaaactatcgctcgatgttaaatctcacgtaatgaaagttgtgaacccgcttggagaagctaattggttcatctgttcccgagtagaatgctaaaatttgaaaatctttaactccactcatgactccgctttctattatcctacaaaaatcgaacactcagataatgtgttttttattcgataaaatcataattctgccagttaaagaacttttaaggtgtactttcagtcttctcgtacaacaacattctctgttttaatactttgtaaatctctgtgacttgcatatattttccaatacttttttcattcaactcggcaactaaccatcggagcttatagacaaatttgtagcctatttccacacgctctgaatcagatattaaaagataaaagaattacaaccccttttgagatttttcatggatttgaactttcaaatcaatatcataccgatgtcaaaaataattaaaccgtttcatagaatatgaatcatattatctacttgaaatgaaatatgtatctcgagattccaaaacaggttttgtgaaatttagttgtagagttggtaattacttaaattggacttattggtcattcaactacattctccataaacatttatattctgataattgtttctattgatagtattagatgatgtgtaccaaatgcagaacggactatgatgtagagaaatcattttatgataagaaattacatcgttttgtttgtcctacttgtaaggcataaattctctgcagaaaataatctagcctattaataaataattgctgttggatattgcatacatcattatccggggacaatttatactattactattacggagtaatagagcacaatcttgaagggacaatgacttttatcgacacctgagaatcaacctccgaatatacatattaagaaaaattgatttaacttatcactttttatatgatgaaaggttccaaaagattgattgcacttttgacacctaaattttagatttagtaggactaggacccaaatccttagagcttttttgttgcggtttgcagattagctgttagaaaaagattctgcatgagagatttgattctttccatgcagaagtagaccctatcgaacaataataggtcaccaaaaaatgaacctttgtctaatttgttattcaaaatagaatatcatctaaacaagtggtaagcgtgcaacaatgtaatggacaattggaattgacaaaaagtgttggtcaaattaaccatgatactattagcattaaaaagaatatggacagcatgaaagatttcgaggatatgactctcgaagaaagggaggaaattcttgaacagttaagaaatcttccagatgaatcaaatgatccaatagatatctttacacactctttcaatgaactttctcaaaactggtctaatgctttaaaagaatttgatacaatttactcagactgcaaaatagaaagtcatgttaaccatactgaggaaagagatgagagtagttggcgggcgaaaatctgcagccgcttctactaatcaggtttagagtttgcaaacatcactaaatattatgccagattacaacattgattggaattattctcactaattaccgaggctttcgaagcattggaaagatgggaggaaattcttttactttaatggtaccaagcaattcaaagccgtgtcgtttgtagaagggaacatttcttggattcgatgattcgagatatgccaatgaattatctttatcacatacggttagtgcatgtttcatgagtaaggaacctagacctttaccatggtgatgagggtccactcctagaagtggtaagtaccagtggggttcatttggatgatatccacccattttctcaaacacttctgggacgacactttgagattcttcggatgtagtttcttggagtagtgcaagtatggtatcaacatcaggatcaacatttggaggtaaccaaagggctgcaccataataatttccaatatagtgggcagacttgtgttcaaatgcttttcctccaaaggcctgggcaaatttggaaaattgtaaaaggtatttctgtgaatctggccatacccaacgtgtggcaggatcagctacaaaggccaattttaacgcatcaatgacagctttttgctcgaattcggtagccgttttgacatctggtattgtcattaaattccctcataatatatcaagtcatgacattttaagatttcatgcaaatgttaaaatttgagatagtcaacacgtcgtggatctcgtattgatgaatcaaattgaaaaaatttgatttgaaagatttagtattttttggaatagttactaagggtaaattttcttaaagaataatcagaaccaggtttattgcctcaaagaatcctatcgattttcttctcaaagtgggatagaaaggacccaggacttgctagtgatggtaaggctgatagcttacgcgttgtggagcaaatactttggttattgcagatttgaaagccacgactgttagtactaatttccgacattctctttttaccgatatcgaaaaatatttaatttccaatctccttccttacatgaaaaaaataactctaaccctttaacttcagataataattggacaagtgatcgtcttgtcaatagacaaatacaaccaagaatatattgaaaaattttttaaagacaataagtaaaaaataaagaggatttattgttgtcctgcggctatgttaccgtcttggaattgaagacctagacctacgttgttacaatctaataatgatattgtaccagtaacacattgtgcattttgtttatttgtttgtccctgctcgatttcctgttctgaatcattgtgtttcttctttccacctgcatatgccatgttatcaccaaaggctactactgaaccaattagggctgctgcaatgaatattgcaaatattcctactttgtgagtttttgttatgttgctcattatagtcagaatatgtaattgaaattgattatatcatagcttagattcttattactgtttaatttcaatgtaattagaatctagtattatgctcacataaaaatttagtaacataattacgacttactctagaattcgtatggagaaggagttaaacgtaatatcactaagttcgtgtttcaatgttcttacctatattcaagatgtacaaaaaatcctcggattatggttttataatgtaataagtaattttaggaaagaccaacgctgcacagcaatctagaattcgaaggtaaaaagttattcaacatgtaaaggtcatatcgttgaaattaatatgaaaacaaacatccaaaaatgaagatggtttaagatatatggagttttttttatgctctcgattaggtgtggagagcataaaagtcaaagatctctttatcatttcaaatatcctagttctcaagataggtaatttctatcctatacaatatgattactaactggaatttgaatgtaaagtactaacttacagaaattattttggtacattgaaaaaacaaaatcaaattttgaaaaaaattgaactttcaggggcatatggtattgacagaaataaaaatttatttgctgctaataatgacattttgcaagatacttcaagaaatattgtgataaactcgaatatcagattagttagatctcttaaatattggttcattgcaaacctctagttgtcctaagaaaaaaattgcaattattcaaatgatttttgataaaaatttataatgtatttatatgctagaacagttagttggaatattgattaaaatttttatcttagtaacatttttggcagttttcgcaatgattgttgttgtacctagctcaatggcgcaaccaacatgggagatatatgaaaataacaactgtggaatatcactaaaacatccttatgcgtcagacattgtattagataatgacaagtctaacaatagttttaaaatccaaagtttcgaaacacacacagatcctgattcattgaacatgaccttaatggtttcatgcatcgacaaagcaatacctataacttatgagaatatggaattagcaagatcgaacttgttaaaggattccaaagctataattcttgaagatatttcatttaatagaacaacaattgatggtgaagcagcaggatcagtggccatcagcaggcccatcggcttaacagacatcaacgagattgacaaaattattgaaaccaatcattctgaccaaacttttataatcagactaaattttaccggagatgaaggtattagtggattttataacaatcataggtatttggaggacaaccttattgactcgatcaaattttctcaataattagattatttgcaaatattgatttgaatgaagaattaatttagtatcgattaggattaacacaagagtaattattatatagataattcttttgattaatctgaaggactagtaattctcggtaaacgctgagagtattgatttatgatcttactgagtttttcattaatcatgatgctcccttggtttattcaatatgcccctatatcacttcgctactagattcatcaaatctaatgaagattcatgataggctagagggcaagtgcgtcttagttaaccatagtaatttaatccaggcgtctagtggattttgattatttgtccaaagggataaaaagtagacatcatccattaatgctagatttattttgtaactaattagtatagttgttgaactagaatgctctttttttaaatataattgaatagagccttctacgagaaatcaccaattgactaagtcaaacaccgtgactattcaaatttgatttcattaaggtttcttaaaacacgctagataattgcaaaaccagagagagattaatccaatatcatcgtttcagccgtttaataatttcaacaatttcatacaccaattccgcctcttccttaagaatatcatgttccttgagatagtattcatattcattctccaagagaacgatccctcgatctaaatctttcccatatatattaagaacactcctcaataatgcaatattcaaataatgaggatctcctttgtttttagattgatcgaaaaggatcccaatattatttaaaatattcttctcatttatgtccaacgaatgtaatatgagattggtttgggctatcactacagtattattattattttgttgttctagttttatttgactataaagtttattcctgtaaaaatcaaacgcattttcaaccattctagaatagcgcaaaaaaccattaagataatcttcatttatcataaatattatagttaagaaagtgtattaatttctatacatattttaaatatgatttaatttattatttttgtataaacacaacatcttcaagtgtaatagcatttttttctcaattgacaattagggaatcattgcatcaagtacctaaatttaatttattattggagagacagcttgttcttttatgatatttagatcaactaggtatctcaaaatccttatcaaatatttgcaaaggtgaatgcaataaaaataatgcaaatctaattgcactaattctgtcagataagttttcataaaaatcaatgataatggaataaggaattaaacggaggtgatctttttgatttttgggccaccataattgagggaattgggtcccaataaacaataatcccgtggattcactttatgctttatttgactgaaaattagactagtagtatcattcaactaacaactaatttgggatgataatgatgtaccatagaaacaattaagaatacagatgtacaaatttatcgaattgaacttagcgtatcattagtacgcagctaaataatttcttacaaatagaaaattaattggtactatttgttgtctgtttctttttgggttgtttaaatatgttcattatcttgtctattattgagttattagtttttgtcatttgctacttgtatatataggatggatgtttgtcttaaaccttcttatcacttttgaccggcacgttgatgttttctggataatgagtaaaacagttactattactatttctagttagagtaaatatttccctatagtaaacgaatttaacatctgataagatgtgtaaatgaagtaacttttgatgaggtcaaaactaaaacggctggttaaatacagatggtgcttttaagtatgagggaatatagcgattgagtgttcagaaatgaatgctgagtaatactgctgtttgattttcgagatgataaatgagggaatgtgatgttctagatagattttagaaccaactgaatccattgatttgcttctttcaaattcatttcctaaattcagagaatgaatttcagatggtaaatatttgtgcatgcgcaaaggctttaaagctaccttctactaaagaattgttgagtgttagttagattcgttgtttgtttggaaaaaattttattttagttggtgaagaaagaaaattaacctttttacaatcaaaacaataataccgatctaattgaccatattgttttagcaaatcgatgctaaattcccatcatatcacatcacaaaactactacacaaaaaccagataattattctagaaaaaaattaactatcaatcatagtagagcattgtattaaacctaattatacacatattttcacatagtgagttatggggattaccttgtcatctacatcaaccacaagtacacttatggaagaagatgaaaataggttccgtttagagaaaatagacgaatgtaacctgctccttagaagattagatggaggaatatactacattaaatgggatggaatcttaccattaacaaaatattcagcaaagtcaaatatacaaaaaaaattagaaattagaattgaatcagatattgaatatggaaggttcatttatctaagaaaaccatacattaccaaaaaaataaggatatgtggaagggactcatcttgtttaagatcttggaaaactgaacaattaaccgaattattgtcaaagctttcatttctaaaatgagatcagatagttagaatgtcaatatgtttatactgacagctacttacacatttccccaagctcttctaaactttattgggaaaaatcaagttctttaaaattcctaactagttgaaatcattttcttgaatcctattggaccttgaagagttgctcagggaattcgtagatttgccttccaacaagtttgcattcaataaacaataaaaaattgacatactgggaaaaattatttgaagctatgaatttacttgaaattatccaactacgaaagatggcaaaaacctgcacataatagatatatccaatcattaacttctatgcatactatagaatcaatttagaatgggtcaaaggattacaattcagcagcgtttaattaaaaacaaaattaactaactaaaacaaaaacaaagcaaaactagaacaaaaacaaaaaaaagattatggaactgatctgctgtagagttttccttctaatgctagtttgtacatttctgctacataggggttccttgcaggagtttcagcgccaagttctaccaaacgtgcgtataccctaactacataggccaaagcacccatgaaagctactactacacccatgttaaacatccagtggttaggtactgaaaatatttcttcaacaaaccaaaagtgccacatttcattgataccaattgtgaacatggtagctaaataaccgataatggttatctttagacccgtattcattgaattgtttggtcctcttaatgctggtactctcctgtcatacatcgcaacaaatccccaacctagtgggagtgcaataaagtgactgtataaccaccaatgagctggtgtaaatgcactgtctctgatggctgtttggtgcaatgatccatcaacaaagttgtctacttctactgatgcagcaatagaccctagcataatgaccattatatagatcttttttagcctctggatttctacttcctttggaattaatgcaggcatttgtgccattttactatcaccatatcttcgttgattaaatatataagatgtgaactaaaatatttataaataatactagaaattgatggaatattattaaattattagatgaatgtttaattaattaactaaatttctgatgttttgtcaatgttgtcaagcttatcgtcgatgattatcatctctgattgattttgatatgaaaaaaaagaagattatgtaatagttatattcttattaagatcaaaagacttgccagaattctcgtccgttatcttataaattattatataatctccagtggggaacggtaccgattgtgtcacagtaaatggtatgaaaacctccttattctgattatgtgatactatatttccgattggcacgttctcctggccacctagaatcgtaccattagaacttgttatgagaaaactagcaccaaagtcgatggagaaaagcggagttccatcttcatccgtaatattattatattcaaaaccaactggttcaatatataaaattattgattctccaggagaataagaagtagaattcttttcctcataaattccaaagccactaggttctgctgtcacgaataaatccttatttgagtaaaagccacttgtattattggtgtcacctgtactattggtgtcacttattccctgagcattagcttgtccataattgaatccattcaatgaacttcccatgactgcaaagatcaagagtgcgaataaaaataccattttcgatgatttatttttcatactacagttctttaatttttgataatttattaacatagctgtgtagtgaattgcaattttttaattaatttaataaataatatgggcaaaagtaaatggatgataagtctattagaatacctcccgataataacgtcgggacttctgtttctagcaatcctcaccttagttggaaatagaaaaaatttgagattacagagcgaatatcaaatatatgcaagaatgatagaggcaagattgaaactagagacttcagagccttttatcaaaatggcaagagaaagtccattctatgcagacagatttgctcttgtagatagtcctgaccaattctacatgcttagagccttcatagacttgtatgaattcatttatagacttcacaagacacatgttatcgatgatcaactttggctgaggtggatgtcgtctgcgaaagccatgaaatcaattcctaaattcttgaatgtgtgggaaaaaactaagtcagtccattcgcctgaattcgttaaattcattgattcattatagccaaggcaaacctaggtacccttctatgaaggaattttgatgttttttcatgcttgtatttattacgaaataaacataacaatcatcaattacaaagccaatgtcctttcttattagaaaattacggaaaatcgatatatttttttaaaatatacataatgtaaatggcaatacaacacaagaaaatcttatcaattgcaatactagcatctttactagtttttagcttcaccgtttcatcgtcaacggctatttcctttgcacaaagggatggaagtagcggcggaggaaaccaagctgcagctcaaaatagtcaagatgggaataatgactcagaaagcggagtaagtcaatcaagctccagttctcaaagctctgaatgcttatctgaaggaagtacagcaggaagctgcaacaacataagtgtgcaagctaaccaaaatggaaatgacgaggaagaatcagcaaagaaaccaacagtaactccagaaagtgaatcgccacctgctgcccaagctactgcagagccagtaagcgcttctgtatcttgcggagaagtaatcaaacaaagcgtcaaattgacttccaatcttgattgtaagaccgatggtataatcattggagcagacggaatcacagttgacttaaatggtcacacggttactggccctggtgtatcaacctccaaagtcggattcatgttgagcgaccaagacaatgttaacatcgttggcccaggcatagtcgaaaacttccaagcaggcgtactaaatacaggcggacaggacgacaaaatatctgctgtaacatttaccgaaaatcaaataggatcatttaacacgggcgcagcaagaactacaatagaagacaacctgttctttagtaacaacatcggtgtagcatctcatacctcaacggatacacgtttgattacaaacctgttcaagtcaaatgaccttgctggagcaacattcgtaaactctgcagcaaacgaggtttcatttaacacaatccagggttcagtaagtggattattcttcgacggacaaagtagcgataacatagtaaattcaaataacatcttggacaataaaggagtagacatcaataatgcaaacggcctcccattgaatgtgaacaacaacctattcaacgacaacaactgcaattcatccgtcccagttggcctctgtctaggtaaataaaaccacctttttttttaaatcttaaatcttgatttagtttataaatttcttctttatttatctaacaccttttaaaaaatatacgacgtaattatcgaatagttgggtcaaatgatatactgctggcggtttttatcttttgcatattttaacctacaaatcgtcttcgacaaataatacatatagttgatctaagagtattgcaacccttaaatcaaaattagaaattggattgtttaaagctcacgtgttcaattctatggtaactttgtcccaatcaatattaataattgggtgatgatttaacatttgaaccaattcgttaaataaatatgaaaaattgactgatagggaagttgtcaaatgaataaacttttggtaagctttgggtttttccagtagtatcaacaaatatattccaccccttagactttgttagatagtctttgatagtatcatttttaactgcctaatacttatttgtcgaattattattttcgtactagattttgttctaaaatttcccctgcgctaatacttgtgtttattgcttcttcgctcgcgtaaaagaaacttttatcagggatagatagatagatgagaaggaagtatcaacaagtcatagcgagtttcataaccccatccgattggaagtccaagtggtatactcatattagtaacgttatcatgttctttagagcggtttgaaaaaccgccttcgagggtgatggtgtgtattccgattgtcaatggtttcagaaaaacccaattaccatcagaaatggcagtagttgtttcacctttcatcaaattcaagatgttattttcaggcagtgaaaaattgaacggaggagattgaattcggtattcatctaatttcaacagaggctgatcatctaatgctgcattcaagaaatcaaaatgattatgaatgggtttcgcacatttcattaaaccatccttgctttttatcaatggatattcgatgtaagaacattcagaattaagtataggaaacagaagtccaacattgtcaggtattatgcacgatctatttgtcgaagggttaaaagttccagataaaaaccagactggtccaaattaactattgttgcaattgattccatattcatgtgacgctgggttttcactaatagggattggatatgcccacttccacatttcagcggtccaacttccgtatgattttccaaatacaagaggtttattataatacataagatcgaatgttaaaagattattatgggaatcataattatgttccttaccataagtactttctagaacagagaccaaggagaacaactaaatcagaatgtgaattatggtggataaacccggtaatagaagaattgtcaaagtacaaaagtggtcatatgaactaaatctaaaagtgaaaatagttgttatggtgatatcgctcaattagctttatatgaatacgattttgtggtctagagacatttatgaaaatcaaaatactaaagattccaatagttccaactctgaaaccttactatatagaatcaataacagctggatagttctaccgatcaagtttgatggattcacaccatataatatgataatgtttgatatccttaaaaatttataaattgtactttttctcattgattgatatctatgattcgataaattattatacaaattatgtatttaaaaagggatgagcggcattgacacaatcgtaaagaaatttgatgaatttgaaaattcaatgggagaaggactacccaaggtagaccagagattggttattgatatgctacatcgattgaagagggatgactcaccaatgtatacgattgaaatatttcttaaagaaaaaccaaataccgatgaaataaggtccattattgaagtaggtttgggagtaatgcctgcattttacgatcatggaacacacatagtagtagcacatcgattcaacttacagatgcttgaatttatttcgaatagtttgaatgttgagaagataaggggaacatttacaggagcaggcagaggggcttctataggtcccgtattcgaaagagacgatagaccagattattagtttaaagaacagacaagaaaaagagaaaaccaaaatcatttggaggagaacacgttctttatttttggttttttacatattaaactatgctagtttttgaacactcattttcattgttttttgataagcaggtatttaagtgatagtaaacgatgtgatagaataaagtcagtaaagttgtaatgttgatatttaataccaacaaaaggagccttcaagtggatgatggcttatcatacccaatattcttttcttctccatccgaatattttgaaaataatatcgagttgcggttctcaatatttttcgtgagatcatcttgttctcattgagaaaatcttcttcaatatgatattttttcaatgactaggatatcataataaaataccatgtcgatcttgaattaaattgagagaaaaaatagaaatggaccttgaataaatcaatgccaaatctaagtaaaaaataaattatctgaaagggatattaaaaaccagagtagcaattcaggtgaataaaaacccctactatcatactagaaatgagtatcattgattctaatttagacatttactaatttgcaggtcttctactttcccgaaggatattgatacgcctaataatcaaagagataaattgaaagctgtttgtggtctattttctgcttgaagtaaattgactttaatatcagaccattatatttaatttgagcatttatgcataatgaacatattttttatttgttgggatcaaaatttcctgaattggattctatcttaatagggtgtcatgccgataatggaataatcccccatgaatgttgcgaatatgatcttatatcattgtatgataataatacacaatttcatcacgatttggcatctaagcagaaatctaagttgttatacaataataatatggtttatgaggttttaattttatctgtgcaagaatttatcaaaaatgacaatatcaattattccaagtttgttaggtttccaggtcaagctttgaaatccaatattgttgactactttataaagaaatgtgataactatcataaatcgttcaacttcaagatgaaaactaatattatcaataatatttgcgaagtcacaaatttgcataacttactttctagggaaatcgtagatgaaagattcatttcattccaattaaaaatggtttcacttaaaaccctaaagatacttattcagttttacctgaattcagaagatagaccatctcatcttaaatatcagataaaccttattaagcaaaacgagaatttgaaaaccagggaacaggtcgatcttctattagaatatattggaactaatcgagcaaacatatcatctttgaccagaagtgaaaaatcgttaaggtttctgattagatgtgaagacatctcaatgaatagtatactgtttaataagttagatttttttaagcaaaaatcaatgtacgtggatggcgttttactaatttgtaattttattctagatcgcgtatatgacagtcaattcatccaaaaattcaataagctattaaatcatattactgacatccaaactaaagaaaaaataacgatgttaaaggaagtaaacttactattagaaattaataaaaatctaatctaaagtaattattgaatcactatcgcttgttctagtggttcaactgttttgtttcttgccctcaattttgctttatattttaagtttcttggtttagttcttagcctatatccacagcatggacaccataaaccatcccattttatgaaaatttcacaaatttgacatcgcttttgaccgcttgcgtaacggcccgatcccaccggcttttgagctttatgtctaatacaaatacctttacaagtcatacttgaaaaccatatcaatgtcggcgatctaacttataaacttatataagcttcaatagatatttataactaaataaaaaatggagttgatagtctaactcgtcactgttatattctttggttgaaatagctcatgcatcgtcatgtattcatctagtttcattctaatgtcatcctctgtcgtgtcatccattccagaaaaccctgctttaaaactaattttatttcctgaaacgtttacatctgaaacctccatatctgcataaacatttcccatttcattaacccattcttgtacttcgtttttgtcaaatccctctgcttctatattcacattaaacatcttggtcacattataccactgctttttttttatttaggatattaataaagatgacgtaatttaatgcctttaagagaatgatttatcttcatttctcttcctggaatccccaatatttcatcaagtcttttgtaaactttgaggcttgttcttcactcagagggtcgccgcaatttttgcaagaagggacgaccttcataccgtataatttaaaatccacatcataaaagtgaatttttgcacaattacacatttataggtttatacatttgatttgctaatttatctcttcttactttatctattggatactgaagatgtagtaaacatttaaagagcaaatagccataattatatgatacaaatgaataggaaaaaaacggtagataaaataacagtattttttctaataggtatgctaggggcatcagctttccaagttaatcaactagttggtatggcttttgctcaatcagaaaactggtatgtaggcaaaggtgtaaagccagatacttattatacttatgaaattaaaaatacggatactaatcaaggacagccttttacaattactatttatttcaaagaatataatgaaacaggaaaatattgggtagcaccaacttttgtagttgatcaaggtaaagtaatcaatggtacaatgtacctcagtgatttggatcttactgcattaggatcttcacctattcctgatgatatgatcccatatcgtagtgcttatgcaacaacattaacatggctatcagcgtttgtaccaaagccggggcagtcattgagctcgccatcttggggtaaaatagctgcaataggtgggtcagagataaagccatcaggtggtgcaaaaattacaaccccagcaggggcatttgatacgactgacatatcttaccacaagggtgttgataatcatatttatccaaataaagacatgccttatccgataaaagcggatacatttgcagatgttacaaccgggaaaccaccaatacaatatgcctatgaattgaaagcgactggaaaaggccaaccacctgccccagaaagccaaattgaaattcctgtaccaccattgactcttcagacacccagaggaacctataatgtacagctattatgggaaccagttgaaataaaagcaggtaataacacggattttggtgtaatatttaccgatgataagaacaatatcgtccaaagagtaacatacggctataaagtattggatgagaataagacggttgtagacgaattcaagaatcaaagagcaaatgaggggacaggtcaatttacatataaatttgacacaccaggagagaagtacctccagatcgtagtggaaactgcaaatggggaggatctgggaatgtttgttgagtctgctacttttggcctcgtagctcaataaactaaattttttagctagataattttccgcctttatttttgactctctcgtaataaacgttagataataaccaattaccaaatctctgaatatcattgtctattttggtccaaagatgaaaagaacccggtaatagatctatgcgcgaattatttgattcggaatttttaaaatttattttcagtccttcttttccctcatacatataagcatcaattatttggatattgcctgctaatcccttagttgcctgaagttttatctgatctcgcccaataggaaaagtttttcgaaatttatcaaatatgaaactcatgttttcagtcccataactttgaaagtcacctattttcttacgatctggaaagtgaatttccatgactagtccatatcttaacccgacgaatttggataattcgtttaacttatagtatgcaagggtagggttgtgaataacatttttctgaaaaaaacccctgttagcgtcgatattattctttaattcacgtaaaaggttagtaaattcctccacaagtatgttgaaattaaagtttaataaataagttaattgattaagttataccttataatgttagcgtccgacagagattctgaacgagccactagtatagaagattaccaaaatacatgcactgagttcattcaagatataagtaaagattatcgggattgggtagaaagatatcagcttccaaaagatgagcgggatcaaagaaataaggagattgaagatatcgtaacaaaaacaaacgattggatattcaagtttgggaacacgataaaaaagattgacataatcatgaatgacgggatcaacaagatggctgaaactactgcaggatatccattccagatagatgtatctagtagtaatcaaaaaagatatataattcatgagaagaagtcaataaaacttaatctgaggtcttttccgcgtcaacaaagacaggttagagtttgtaattatgacaaggataatatttttttattatcatctagtagtaaaacagatgtgaaatacagcaagactagttttgattcatcggatctgctcgatgaatttattgtaattaacccaaatcaattcgatcatgaagaagttatttcaataaccatcaaatttgaggaactagaaaatgaggttgttaaagaaagtcgtggttatactacgctcttaataacaaaataaaaacagttagatcactaagaacctatctttaggttctttgcacaaataccccgtagacattcgattgctgataagatggccaaataactagttttagggttgtcagggctgggcatgttatcaaccttgatttggaaacttccaaatttccacttgacctgaatctcgtgctgattgtttattattttcggatctactactattttgaccctagttttttcaaaccctattcctgctaaactaaccaatgcggatatgttaacatttgatggaaattccttgatcgcatctacggcgttaccatcaaaaataactttcttttctttgatgatatcgatatcgatatcgttattgtaaaaatatggagcaccttttaacgatttgttgctttttgtggttacgatggtaacttcatctatgtagtttttcacactacgaataatatcagccccaccaatcgcccctgacggaagaaaaacattgttatcattatcggacattaactgaataatggttttataaaatgcaggatcagaaaaggctccaatactcattatcataatgtcctttccttgtttcaatatggtagccatatacgtttgagccgctttgacagacgcggcctcaatgaccagattgacattgtgatagtcatttgatgcaacaagttcattaaaatcatcaaatatactagacggtttggtctgtaaatccttatgtaatgacgctagctttagggggtctatatcgaataagatagataatttacagtttgggattttcttagcgtcaattctaagtgctatttcacgcccgattgctccgcaacctattatcgcaacttttacatccaactttcatgtatgataaaaaaaaatcacttataatcatttatcttctagtttgcgccttttgaagcccctttaggtatttatctaaaccgacttgttccaattttgtattctttaatttgacctcttctctcattttctccttgaattgattcaacttcttaagtaaatatggtcgagaaattgagaggatcgaacatgctaaaagaccagcattctttgctccattaattgctactgtcgcaacaggcacaccgggaggcatttggattatggaatagagcgaatcgataccattaagaggattggtcgaactgttgagaggtactccgatcacgggtataggcgtcattgaggcaaccatgcctggtaggtgtgcagatccccctgcaccactaattatgaccttgataccacgtgtttgggcagtttgagaatattcagccaattcaattggcgttctatgtgcagagactatctttacttcgtatgagatttcaaactcattcagtactctagcggcctccttcattattggcaaatctgaatcactacccataattataccaactatcggtgagacggtttttttcaaacccgctggttcactgagctccggttggccctccgactttttcttgctattattattaattggtttagatttcgccaaagaatatacatgatcttcaaactagtagaatttgaatttttagatctatgacgatggttcttggactttgagaagatcttctatgttgtatttagttaagatgggatccgagttattcgatacgatagttacatgaccgagttttctacgtggtttcgtttccagtttaccatatatatgaattttaactcccggaataccaaacaattcatcaatccccgtaatttcatagggaccagtataattgttcggcccaagaatattaatcatcacagcatttgatagtaatatgggctggagaagcggataattgaggattgccctaatatgttgttcaaattgagaaattgaacaagcttcaatagaataatggccggaattatgaggtcttggagctatttcgtttatcaatacattgtcatcctcatcaacgaacatttctattccaaaaatgccagaaccctttagagatttcatagtcattattgccaaatctatcgcttttccttcagtctctttactgattctggctggaattatagaagttttcaaaatatgatcctcatgaatattttctgctatgggaaagtatgaaatagtgcccgatgaatttctggcgaccataatggaaatttcttttttaaaattcacaaacttttctaccattatttgacggcctgaaaagtaggcaaaggctttgtctatttcaatttcagatctaatcaagtaatttcctcgaccgtcgtatgaatcttcacatgcttttaataatacaggaaaccccgaattagaacaatagtccatcaattgttctttgctagaaactagttcaaagtcggggactgtaatcatgttttctctcaaaaattttttttgacggtacttattttgaatgatggagagggtttttggtgagggatgtaccacgaatcctgattcttcaagattattaagggcagtggcatttgctaattcgatttcaaaagtgataatatcgacctcctttgataaatcatatattttttgttcgtcagagaagtcaccaatgattagtttatctgctagacttgaagcaggacaatccttgttgggatctaatattattaccttcataaacatgcgttttgcctcaaaagccatcatctttccaagttgtccccccccaacaatacccaatctgattggtttattaattgaaaacttttgtttgaataatgtcaactaacttacctagtaaaattacctaccaaatttgatatagacataactaccacaaatttcgatttacttcacaaatatttttatagcttgtggaggacagacattttcgcatgccaaacaaaaaatacaatccttttctctaatcataaatggtttcctctcggaagccggatgtcctggcgtatctagccattcataaacattcactgggcatgcatcaatacaggcaccatctgaaatacaaatgtcaaaatcaacgcacacatccgtgccccaaatcccgagttgtccaggtgcatcgtatggaccccatacttggattccttgaaactttcctgctggctgtctctttgatttaaagccagtatctatgggtccttctgctgtctggtagtctgttccagtgcctgtaagttgaattgtggtattttcggaaagttttgttgctttagatgcgggcataggagatggtacagcaactgcttgattttcaattagattcccgcctgagggttttcccgttgtcgttgttacagatgggtttactaatgatttcttctcttccttaagattctttaaagcgtttgctaaaggagtgatagattctaattttttaattgattcgccttggctcaatttctggattttctggtagtaagtaattagtttttgtcctatcttggtatttcgaattatattatctataattattttagcattatgatcagccttttgtctataatttcgaatccaataaaagtcaccaaatgtctctagaggctttatctgataaattatgtccaccacctcccctatgactatttcaactgttacgtttagttctgcagattgttctgaatttgtgtatatatcaaaacctttttcaatccatttaaaagtgacaaaaattctgtcagcataagtatcgagaacatatccatgaggcttgagttcactcataattccattaacctcagactgtccaactatgtctacaggcaatctatatattccgagtttagcactatgagttggataaatacctcgttttgcaacttcagaaagcattacccaaactttatctgatagcaagagagacattgaatataaatacttttaattgaggttattaaaacttatgtatactcaaataaactagtctacagttcgtccggacatgtcatttctcttatttcattatattttttttccatcgtttccccaatggtagtaacgaactctaaatcatattcagatttaggataaaaccagcgctttacaaccttgtgcccagtcccttccatatcataaatcatacctctttcagagatcactttacttttttcatcaattattgtatctttaacttctaaaccacgcttggtcttgtctatcaatgtgagaaattgagaatcttcaaaaataaaatagaacttccctttcttaatcaattcaggttcaggtttcgaaatagtattttctccagacatgaaatatttagcccatttatttttcaattggatttccgattatatttccccattccgtccaagaaccatcatagtttctgactgaaggataccccaataaatatttcagtacaaaccatgtatgcgatgatcgttctccaatcctgcagtagcaaattatgtgtttatcaggtgtaataccttgcttggtgtatagactctccaaatcttctgcggatttaaatgtcccatcatcgttaatagcctgaagccacggtatatttttagcgcctgggatatgtccacctctctgagcatgctccattggatattctgggggggatgttatctccccgctaaattcttttacagacctaacgtcgactaatccaacctccgcttttctaaatgaacgctttacatcatctaaataagcccgtacgccttcatcaggaggagctgctacataattggaaggatttggagtgggttcatccttagtataaggtcgattttcattttcccatttttttcttcctccattcattattctaatttttttatgaccaaaatacttaaacacccagaatgcaaatgcagcgaaccagttgttaaaatctccgtataggattaattcatcatccggccttactcctagacgtgacattaaatcctcgaattggagcttattaataatatctcgagttgatgaatcattaatatcccttttccaccacaccatgtaagaatttggcaagtggccctctttgtaggcattttccacgtcgtaatcaacttctaaaatttttatcttatcattattcagattattgttaacccaatcggtctcgcaaaggacatcttgattggcatattgtttggtcatgaataaagtaggaaggtaaactatataatatatttgtctttcaaaaaggggttataaagacaatattaaaaacaataaaatagtacgagaaaatatgtttgagtgaaacagcctaaatgggccggtagtttagtctggtagaatacctgccttgcatgcaatcagcagaggatacgtaggtggtcgtgggttcaaatcccacccggtccacgtctctataggtctttaaattggattccattttttatgtgttatatattatgaccattgaaccaacaaaatcaagcatcgatcctttttctacatcaaattctattttaaatactgattttaacgacattgacataattagtcaatatttagacataaatacagacctccggcccgggtcaaacttgaatatctataatattaacaatgctgttcagtaacgcttaatgactgattctttgtaattttgtttgacgccatttcctctaaacgatcttaatcttaatttgtaattgcagcaagggcaggtacttttatcccatgaaataaagatctcgcatatagtacatcttttctgtttatcgtgttcatatcttaaggattcattaaagcttctttttgctttgtatcttacacatatgccattacaactcatttacgaatgcattttcatgatattgtttgctaaaaggattatcgaatatttatctaaaatattttaatataataattgtagcaacaaaaatactattaaatttataaatgaagaggggatggaataaggaaaattttaaaaaggattgaaatttatccaagagatggtattttttttagatattatagtatgtgaatttgcacagtgattcttccgcccatcacaatttcatgagggtgcccatttataatttgtcttaaccgatttcggcctgttataaaaggaaatttgatttacctcttttagaagatattaaatatccttcgtcctgattccctacactacaaagaatgaagtttcatgtcattttaccacatatccgattcgattcgtgccttatacttttaacctgtcacgtagacatacggccaggatttggttgatattagtcgtaacaagcgtcatggatgaaagccagactgggtgggcattatcgtctttccgaaaatgaacaatacgcaaatatagatttaaataaaaatatcaaaggcaaataaaaaaattaaagatggattggctattttccacccttttggtttttgactacactgcttgtatctactgttggttttaagctcttaattttgtcttgacctggctggaaacctgtcattgtgtttttttcatttccaccatctactctatacgctccatctccacctgtgttggtgtcgtagcctgtgccgctgtttattgtgtcatcccctgcctcagcctcattataatcattcccgtcgccgcttgttattatgtccgttccatctccacctgtattggtgtcgtcgcctgtgccgctgtctattgtgcgtcagaatcctcatttgcaatttatcgattaaaagattcgttagatcattatccctttgttaaatacatcctgattaataacattctatgaaaagattttagtttggagtaattcaaataataataatgtcgatttcaatttttgtaaagactattacactctatagtatcgttataatttcattactaagtatctttcaaacttcaagtactattaaccacgttttagccagtagcatagaagatcccgatcgaatttcaagagacgggtttgatatatcttatcgggtgaacgaccaaaaggtggtggatctgaaaaaccattttgaaacgggattggaagatagaaataaagataactgggtgtttgtcaaccatgatatttatggttcaaggaacagtaatcaaactcagatcgacaaatctaatgtgggagatttaaaagttcagtggcgtttgaataacacctttgaaattcaggacccacccataatagtaaacggtagtggttattttcaggactatataggaaacatcatttcttttgatactctaactggcaacattaaatggaggcttgatatagacggaggcccaactatgggtctgtatttttctgatggaataatttatgcgaccgtgggaactaaagctaaaattatttcagtggactctaagaatggagatatattgtgggagtctccaaaattaggagataccggtttaggatatgcaataaattcaccccccttgatttggaaagattacgtaatcgcaggttctggcggtagtggattaccccctggaaagggatttgtaaagggcaacataacggcactaaacaaaacagatgggagcattctatggaatattgacacaacgactggagcatgggttgagaacggtaaaaatccacctaacggcggagcaacagcttggtctggcggatcaatcgacgctgatacaggaattgcatatatccccttgggcagtgcttcccctaatttcaacgcatcaacaaggcaatcacctaatctttattctaatcacatggtagcggtagatattagagagggcaagattatctgggcaactccatttattgcccatgggacagtcttgaatgtaaaagttccagacactcatgattgggatacttcttggggaagtagtgtaagtaatgtaaaatttgaaaatgggtcaacaaaaaaaatagtgatagggcatgacaaaatgggcaatgtaattgcaatggatgcattaaatgggaaagaattatggtggacaagtttgggtagacaagttaacactgacagcctaccatcaccatctgggagcggaatgatttggtcatacggaatatataactaccacgcagtggacgaggacaccttatacataaccgcaactaatagaggactaaatttttttactgacggattaagcggacataaagaggatcccgagaattcgatcgagcagggattggtaaatggtagtatatatgcattagacaaaaaatcaggtaatgtaaaatggaagattgacacagattaccctcctagagtatctcccatggtttcaaatggggttgtttacacgggttacatcaagtttggtgaaaactataggaccggaatcatcttggcactagacagtaacactggagaaaaactttgggaatatgatgttcggggttcaatatctcctgtaggagcatctattggggacggaatgctttttgtacctactgacaaagtcaatttgtatccaaacgaagatgatgataatgagataggtggatcgataatcgcattcatgccaatagaaaattaattggatcaacccttatttttttcatctgttgagcattctaaacaacataatgaaatagaatttgacttattgttcttatattttatggtacagttcttacattgatcatatgggcaataatcacattttctaagttcattgtcgcaaatcatttttgtacacaacctgcaaaaactaaagtgtttattacatattgcattattacagtaataacatctttttatttcctgacccctggtcacatcgatgttcttttcacatactatacagacctttttagctggaggcattgttgataggattccttccttgcattgtattaattataataaataacagttaatttaatttatttatgtaagcgattgttagagccaaattatactaaaagaccatttgaactagaattgctatatagccacatacaatcttgattcagatattggaataattaaaaatccaaaagcagattatagaggtattgtaatcttatttgccttctcaccgtgtattcaaattcaatcttgtaagagcgataggtatttcatgctacatttaagtgataaactctatgcaatcatccttgcacgataagcacctattagaacaaggctaaatatagattcagaatcgtataaattaaacgtgaactataatctaattgacatttcaattttatcattatggtagaaatatatttctgataaaaattttgttttaatagtacagcttgatcttaagaattttaaataaattcaaaaatccattaaacattgataatgaagaatattatgataatttctgtgatttctatgattacgttattttcgattataaataccaattatgcttttgcagataataaagatacacaagttaaaactggggagagatcagatgaacaaaacagagatcttgttcaagataattaccaaaataatcaatgtagggatgatgcaaagtgcgataatcaatcactcgaacagttgaataatcaagtgaatcaatgtagagatggtgcaaactgcgtaaatgaatcagtttcaaacattttcgtatgcgaggaaaaatcgttgtgcttgatccagtatgaagggccatttgaattgctaaatccttattaagttaaattcgaattatattttggttttaatagcatatgctatatgatgtttttagttctcatattggaaatttataccccttttgaaggtgtcctttttaattgttaagtgatgtttgaatacagcacccttaaccctagttagattttcatcctcttccaatccccagtaaaatctttataggtccttttttatgggttcaatctttatgacaaccaattcaaacgtgttcacgagctatttacaacaaaatgagtactatttttgtgtcaaagtatacatatttcattgcaaatactagttgatggtcggaacttaccaaccttattttcaagtatgactcataggattagagttcaatatcatcggtgttagtgacaattcttagataatttaatttgaacataattacaactaaaaaactaataaatatgcacaattcatccaaaggtttaaaaaattatggaaatccaataatattatgatggtacaacaattgatttgtgaccaatgcaagattgtattactagagaaggattcaaaacatttgaatgatgagagatttcccataactgaggaagaagctaaaatgattgacagggatcacagaggtcatgaatgccacattgaattggttgaaaagtttgcatagaatcacccaaatgtaaacatataactttaattagaaataaattgaaaagaaattggcaatgaagaaaaattttaatgatatggatgattaaaaaatgttatccctcggagccaaataaaaataatagtggaatatgaatagtctttatccaaagatcagtaaaatacctgttatagtatacctatgatccaaagaactctgctttatgctcctcactgcaaaaataatcgattttttttactcccagattagagtcaccatccacatgaggccaagccaaattgagttttatttctcgaccgcataaagcacaatgtattatcctttcgtcaatatcctcattacttttaaaattattcacggattgatccatttgaactagactccatataagctaggatactaaagaaagaatttatgtaagataactaaagaagataagtatattgtctttctttggaaatgcatcaggaagtaatagtaagaaaagagacaagtacaaagaattaacccttgctataaaacaaatcgtacttgaaagatcaaaaaataggtgtcaggaatgttcaaagaaattatctggaacaaatcaaccacattttatttatctaaatgggtcaaaaaaggataacagaccagaaaacttgcgggctgtttgtcctgaatgttatgagggtaacagtccaaataataacggaaatatgttctcatcgatcaaaaaaatattttcaaaatcataatttcattcttacaacttttttaagagattttatcatcccatggtcataatttcattcttacaacttttttaagagattttatcatcccatggtatgtaatacgactaactcaatgcaaatgagcctttcatgaaagggtgaagagtacaaaagtattcatactttgattcggtaagactggttgtatcgagaacgtatttcttttccgtcattatcaatgatgaatcaaaggatttgccatcatcagcgaaactagtcaccgtatgcggaacattgtctaaattagtccattctatagcttcaccctttttggcttcgattattgcgggttcataagagggatttccctgacccgaggcaccggcagggatggtagcaggaacaatagtagtattaacaactttggggattgttgaattttgagattcaccacccgttttttcatcttctgaagtcgcagtcgcaggtgaagccatccatgcagtagatactatcaaaccagatccgataatcataaccactacacatgctatggatattttcattaaatgagcattattcctgtatgaagcgattattattattaatgaaggaatacttatagtaacaataatggcgatataagaatatattgagggaaccttggtgcttatttgcacagccccgatgattccaacagttataaataggatcaatattatacccaccgcagttttggatttttttgaggtaggaaaaccatctttaaagagcccggcagacaagaatattaatccaaagaacatacataagattgatacggattgcatcccatccataaatgttttagcaattccagaaagagctacggctactccagcagcaccaacagctgttaaaccaacgcccggcatgagcaagtcccagtctgtcataaatatattaaaaggtgagtatggtataattaatagtttctttattttaattcgtaaaaacaggtttccattttaagaggaaggtctgacggctaatgaatcaactaacaatagagctcaaggttagtcaactgtcaaaattagataagactacaactatgagtaatccacaagagtcgtgcgcgctactattgggcaggaagaaagataacgtctatgagatcagggaggtaattcccatgaataatagaggttcatcggaggtcagatttactatggatgaaaatgaattattgaaaatttatgaatacgcagaattattgaatacttcagtcgttggcatatttcattcacatccctccaacccctttccatcagaaaccgacaaaactttcatggagattaatccaataccatggttaatcaaatccacaataactgatgagatgagatgttttatattcagtgattcatcgaaaggaaagattgagggtatcgaagaaatcaaggtggttattgtcaaggactaattctggaagtatctctaggatacaatactgcctctctaatattattaagacctaacaataccatcattaatctgtcaaatcccagcccacagcctgagtgtggtggcatcccccactcaaagactctcaaatgatctttaaagttttcgggcgataatccctgttctgccagtctacttttcagttttgacacatcgtgttgcctagtccctccagataccagttcaagatggccaaactgcaaatcaaatgattttgacagggtaggactggattccttctcgtgtatgtaaaaaggcttgaggttaagtggccaatcaactatgaaataaaacttgtcaaatttttctcctaattttcttaaagatgaatcggatagatcatctccaaaggtaactttttctccgagactaattaattcttccaagcacttatcgtaacttatcttcggaaatggatttgaaatcacatggtctaatgtgttttcttttatgaacggattctcactgtcgatacaatgggaatctctcaaatgcatgagtattttcttgatcaattcttccactaaattcattacgtcataataatcaaggtaagctgcttctagatcaacactcaaaaattcattaagatgtcgaagagtatgagaattttcagctctaaaaaatggtgcaatttcaaacacacgatccaaagccaagactagttgttctttatataactgagggctttgagctaaaaaccctttccgtttgaaataatcaaatgaaaaaaggtttgatcctccttcacttgcacttcctatgattttcggggtattcacttctatgaacttgttttcagagaaaaaatctcgaattaccctcaaaatattggaacgaatgagaaagatattagaaattttggggtttcgcagatccagagctctactatccagcctggtatccaaattagattcaaccctgcctgttggatcaacagggagagatagggtagcgggtgagaaaacaaaaatttccttgactttgatctcgaaaggaaaattcttagatttagtaccttttactattcctgttatcaaaatattactctgtctaggaattgatttagctttttgcaaattctctccgaccaaaacagtttgaaccaaaccggttacatctctaagtaagatgaatccaagtttacctatgtccctgaaatcctcaatccaccctgcgactttaacttctgaacctgtctgtaacccttgcaattcagaagtgaagtgagttctcgtattcctgtttgattcattctgagctgagtgagccatatctaatgaaatcaatcaactccttttaataaactacatgttcagcattgaaatccaaataaagttttcaatctaactcagttatgagatcgatttgcctaactgccatagatatcatttttatagtttctaaccttttttcatcaattccctcggaattctttgccagtacaacccttgttaacttactcccgtcgggtaaccagacaaaatttacactttctaacttgattggatgaaataggttgtctaaaaatcttcgatcattagaatcagattcaattatccaaatgtctttctgaaatgctttatttatgatatcacttagttcattgtttgaacggattaacctgatatcagaactcttgagcattaatatatgttcatttttaatttcttttgccgatactaatgtcattttatttatggtagaatttttttgagctagtcttgttagaactatagagctctcaacgtctgattgtgtgatctggcccgactcgagtttgctttcacataagttacacaaaatacctgttttagcatcaaaagtacaaataggggttttcattaccactttaaacctaataatagaaatcacttaaatatctttgattttttttagactatccattcgtatcataaatactttgaatcattaatttttattttttttacgtatatagaaaatctatgtaaaatatatatttaaacttgagccatgctttatgatggatcaaatgtcttaaagtagaagacgatataaagattcattggcattttggcaaatatttgagattattgggcaatttcaagttagtggtggtagtaagataaggttcattggtagatggatgtctaagtgcaaatacccttaccctaatcccatttgctattgtaaaataagtgttctctcttgaccatattttttcagcgatagttttaacatcaaaaatatctccattaattcccacttgaaatataaccccatgtgtatttttttttacacaggttataagtaattcagtcatgaattcagaaatcaaaataaaatgacccaatcacaaataaaattgtttagcacactaaaattgatgacaggtctttgcaaaaaaattttataaagcaaaagggaaagtgaacttatgatgaataaacaaatgcctaattctgcataattagaagagaagtaatttgaaatgaatgagggaaacagattttatacaaacaatcctggtaaaagaggaaactgttcgattgaagtcaatgatctttctatcgaatatgaaacaaaatcaggaattttaagggccgttgataaaatttcgttcaagatgaatgatgaccaaggtatcggtataataggggaatccggatcaggaaagagttcacttggctatggactcatgagatcactggcagaaaatgggtccgttgtatccggaagtttcatttttgaggaccaagatattttgaatatctcagaaagggaatttaatgagaaatacaggtggaagaaaatatcaatggtgtttcagggttcaatgaatagtcttgatccagtgtttactatacaagatcagatgaaagaaattttgacatcacacaggaaaaatatatctaataaagattgtaattcgattttaaggtctgctcttactgatgtaggactaaatcccgacctcgtttgtaagaaatacccacatgaattgagtggtggaatgaagcaacgaatagtaatagccaatgcattattgcttgggccaagaattctaatcgcagacgaaccaactacagcattagatgtagtgattcagtctcaggttttacaattactacgaaaattaatagaggaaaaaaagatgaaaataatagtgattactcatgacatgtcactgattccaaatctagtagatagagtaatcataatgtacgcaggtcaagctgtggaaatatctgatataagaacagtgtttgataaacctttgcacccatacacccaagccctcattcaatcaatacctcacataagatcctcagagaaatccatcaaattcattagtggagacccccctaatttgatagaaataggagaaggttgtcggtttctagatagatgtcctcgtgcatttggagattgcaaaaacgatccccctgacatacaagttggtaataatatggtaaagtgttggctttataaaaatgacagttgatctatattatttagacgatttgactctaattgtccaatgggtatttttatagatattaagtttatatcttaaaatacagaataataaacattaatgcaagcacttctagacgttcgtaagattagacaggattttccaattttaaatagacgactaaacgatggaaaaaaattggtatatcttgataatgctgcaaccactcaaaaaccaaatgaagtaatagatgcaatttgtaaatattattcagagtataattcgaatattcatagggcagtttatcaaattgctgaagaagctacagccgaatatgaaggaacaagggagaacgttagaaaattcataaatgcaaaatacgaagaagaaattatttttactcgaaacactaccgagtcaatcaatttagtggcttattcatggggaaatgccaacattaagaagggaaatacgatactattgaccgaatatgagcaccatagtaatatcgttccttggcagattctttgtaaaagtaaaggagcaagaatcaaatacttggaggtaaatgaggatggatacttagacctagaggcctacgaggaacttttgtcaaggaaaggtgatggaaaaatcaagttggtttcccttagtgaaatgtcaaacgtattagggactatatttcctgctagggaaattatcaaaattgcacatgaaaaaaacatccctgtcgttttggatggtgctcagtcagttccacatatgaaaacagatgttcaacaaacaaattgtgattttctagcattttcagcccacaaaatgctcggccctacaggagtaggagtcttgtatgtcaaaaaagcaatattagagcaaatgaagccatttatttctggtggcgatatgatcaaagaggtacataaagaaaacacggtatttaatgatctcccctacaaatttgaaggtggaaccccaaatattgctgatgtaattggctttagctctgcaataaagtatctcaataagatagggatggataatgttcgggatcatgaattagaaatgaccacctatcttttaaaccgcatccaagaaataaaaaatataaaagtatacggtcccaaaattgctaaagatagagggggcctggtctcttttaatatcgaaggaattcacccccatgattgcgccacaatattaaatgatttcggggtagcaattaggtctggacatcattgtgcccaagtgttgatggaaaagcttgatatcgtagcttcttccagagctagcctatatatttataatactaaggaggaaattgatatattaatagatgctttaaatcatgctaggagaatattcaaaatatgagtgaagatatttacagggaaatgatacttgaccactatagaaatccgcgaaataaaggaaagatcgaggaaccggatataagaataaatgatagcaatccactctgtggagatgaaatttcaattgatctgaaagttgaaggtgatataattaaagacatcaagtttgatgggagaggatgtgctattagccaggctagtgcctcgatgttgactgaaatggtgtcgaataagccgcttacaacaattaaagatatcacaaaagacgatgtgctcgaaaatattgggctgacaaatttgggcccagctagaataaagtgcgctttactttccttaaaagtgttaaaactgggaatggtaaaatattatgtcgataaggatccaacatctgctgctcaaatgaaggatgaatccaaagtcttttaacaaatagcaaatgatcgtggatttgattctcctaaaacagtaacgaaccaatttctactaatgtatggtgaataataacatccaaataaaaccgacaaatccttattggaatatcaaaggatcttttatttttgtatttttttctatttttgttattgcaagcgttcttgcagtaacaggagtattaggtaatttagatgaaatcataacaaaatttatcaatcaaataaggagccaaacattggacgaactattcattattatcactaccacatcagatactattaatttaataattgttggttttattcttacaataattaagagaactagaagaatagggatgattttattgattactttagtttctgttaccattttagtaacctattgtaaacccttgtttgcaatcgagcatccaagtatcgattttaaaccactagtaatactaccagataaattcacgcttgaaagggatagttttatgccctttgcccaagatttttcatacccctcaaatcatatagcctcagcagctgctttcagttttatcgtggctggattgtcctataaatattcacccagattcgctatagcatttttaatatttttcccgacgttaataggcttcaccaaactgtatctttctcaacatcactttatggatttgattggcgggtatttttttggtttggtaatagttgcagtattagtgaaggtcctaaaagctaatgagcaacagagaattaatattgtagattcaaaccagggaggataatactagtagtacgaacagaaccttctgtcatgcgaattccatttcaaattctaaaaaacataaaacgatagtatagttttagttgaacctgtttgttaacgccggatctagtaatagccagccaaagtgtgaatcatcatgaacatatcggtagtccttgatatttggccttaattttaaagagcggattccagataacaactcgttttgaagttgcaatcccaatttccttgaaatatcattattttttggagagtcaattgtccttggtaacaagatcctataactgaaagtatgagtaaaataacatcgggtataatgatctaacagcctctttgatacaattggaacatattcaaaactatctagattctcggtaaaatctgtggaaaagcgttttagaaattcaatatttaccaagcagatagtagaatattaagaatactatttatatacattctgacaaaattaaagatgtagaattggtgttacttcataaaagtaaattaaaaaattacaagattttctgctttgatgttcctttccgatcctaaacctgactataagtcagctcaagttggtagtaagtgatttgatatgatatgatttaagataggttattatctttcagttttagaatgagcagattgcatcctttttcctttggtctttttagttattttggattcacgggtaccctggatgcctaatgctaaatagcatacgattcctttcgataggaaacatctcataagatctgagcacaactatccttaaacgaatcatttggttttcccttatttcattttaactgggactaattaatctcttaaaagatactaatacgagcatatgcaattgttattttaatcaagtagtatttagcaaatccaatagaggcaatccgacttgagataggcaagttataatattgttctgcctgtgtataaaaggctgcatgtggcgaaaggtagtcaagatttagatatcaaatcattttagtattatggctacttttaccctgtttttgtgatttgtattttgcagaagagaaaaggatcaaaataggcgaaataatgaaccgttattgtatcttatctattaggataggttcgaattatctaaaagatgaggcgtctgtttttctgttatttttatataaaagttacgttgatagggtcaaacgaagagtacaacattgaagagattgataaaaaatatcgtagcataaaaattaaatcatggtacaagaacccgcctttaatttgctctatttgttctgagaaatagagcattggtatgcataaaagctataaaatattcaatcaatttctgatattgtccgattaaatccatccatctctaaaatatcaatttttggtagtggctttttgattaaatttaaatatatcaaaatttttccctctactataatgacaaataatgctaacgagtttggatcgactaataatccctatcaaatggcgttgaaacagcttcaagaaactgcaaaaattatcaatttagatgaaggtattcacaaaatacttgcgaagccaaagagagttctaacagtatccctacctgttaaaatggatgacgggagaatagaggtctttacagggttccgttctcagcacaatgatgcaagggggccatttaaaggtggaattagatatcatcctcaagtaaccattgaagaagtaatggcactttctatgtggatgacttggaaatgtgccgtggtagggatacccctaggtgggggtaagggaggcataatttgcaatcccaagaatatgtcaaagtcagagttagaaaggatgacacgaagatatgcctatgctatttccgatattattggaccctatactgacatcccggccccagacgtatacactggcggtcaagaaatggcatggataatggatacttattctgccctcaagggcaatcgcggagaaccgggtctaattactgggaaacccctaccgataggcgggtcattgggtagaacagaagctactggaagaggactgtcttttacggtaagagaggctgccaaaaaacaaaatatcaatatgaatgaggcagtagtagtcgtgcaaggatttggtaacgcagggcaatatgcagctcaattagttgaagaacagggtgcaaaaattattgctgtttcagatacacaaggagcaatcattaacaagaatggatttaaagtaaatgaattaatcaaatttaaactagaaaataaatcaatccgtggctttcctggcgcaactgaaataaataatgatgaattattgactacagaatgtacgattttgatcccagctgctttggagaatcagattaccaaggataacgcctctagaattaagaccaaaattgttgctgaagcggcaaatggtcccactactccagaagccgaccaaattttttatcaaaacaatattttggttatcccagatgtattggctaatagtggaggagtaacagtatcgtattttgaatggctccaaaatctaaggagagaatattggtctgaagctgaagtaaacgaaagattagatgtaataatgacaaaggcgttcgccgaggtatatgatgcacatcaaaaatataatacaaacatgcgtacagcaagtatagccttggcagtcaatagggtcgctgaagccataaagctaagaggaatatggccctaaccaatactcatttgacctgatagtataaatcttacaaaaacagatcagaaaaagcaggtatatcatcattctgatttattttctccacaccataaatcataaatttaaagtttagccccgaaatatatcaatataccatgaagaagaaaacgaaataaaattggattttaaaagaaataaaaaattactcagtagaaaatgaatgaccacatgagcagctctttgtaacgtttggattagttatcttaaatccagatcccatcaaactttcaatgtaatcgactactgctcctttcaaatatttttgactgtaattatctactaaaattttaactttgttttgttccaatattacatcatcttcgtctggattttcttcaaaccccattccatatgataatccagaacatccaccgccagtgacatatactctcaaatagagattatcttttccttcttgtttcataaattctgtaaccttttctgcagcctttgctgtaacatcaataattttaggttgttgtacacttgccatgatgtaatacaatatgcaatacaaatttaataatgttttcctataaataaaccaaaaaaaagagatgattttgtaaaaaagggtctattgatgaggcttggatagtgcagaccatttggctaacgaactagctgctatactccatgtatttaccgattgatataccggcacattattctcctctaacttgttagccattttttgagtaaatggaccacccaatgcgccaacaaggatgggttttttcccttgcctattgaattcggccaaaatatccactattttctcctcaagcgggtcatcttgaaagacgaaccaaggcattacaatatcgacatttggatcatccataaatgtctggatcgcaaatttataatcgtctgcatttgctgatcctgtgacatcacacggattaccaagtacataagttgctggatagtgagacttgaatgatttcatgctctcctcactgaggtttgctacctgtaatcccagtctctcaaattgatcaatggccgcaattatcggcccggcaccattcgtgaccattgcaactcggtttccctctggcaccggctgccatgatagggctttaagagatgcagtcagttcatcgtagctgtcaactgaaattattccattttgagaaaatgcacctttcacaacgctatatgttccccctaaagagccagtgtgagaagcagcttgtttagcacctcttgaagttcgcccatttttgaatactacaattggtttttttcgttcagtaattacttttttggcagtgttaacaaactttcgaccatctcccaagccctcaacatataatcctataaccttggtttgcgggtcctcagccagataccagatcatatctgcttcatctacatcagatcggtttccatatgaaaccattttgctcatcccaaaggcaaatgaatgttccataaatgcgatgcctatagttccactttgagacaaaaaggacacattaccattttttggtctaagcatacggtcatgtccttggaaggcacaatccaacctattctctccgttgaacattccaatgcagtttggtccaataatcctaatatttagctgagatgacaattccttaacttgttgttcaataattgctctttctccccctaactctttcccgcctccagaaatgattacaacattgtgaatggatttatcgccacaaatctttaacaaatcgggaacaaatttcaaatctacagtaacaatcaccacgtcaatggggtctttaatatcgcctagacttttgtaggctggtatacccattatttcgggatagccttttgcatttacaggatacacgtttcctttatagtcatgctttactaaagtttctaacacagagtttcctatctttccaatttcaggggaggcaccgattaatgcgatagatttggcattaaaaaacaaatccatgttagtggagttgggttcaactttagaaacaacattatatttgggttgttctgataaaatgatttttgcgtcagcaacaaaataactgtccggatatacaattacaggattgaaatctatgctttcataataaggtgaaatatcataccccaattttcctatatttagtaaggcattagttaatacttccatatttatcggttctgaaccacggtatccttttaacaacattttaccttggagttcttcaatcatgtccgttgcatcttccttggttagaggaagaaccctaaacgacacatctttgaataattctgtgaaaattcctccaagtcctaccatcataaccgggccaaactggggatcattttgcaaaccaacaatcatctcaacccccttggggaccatcttctcaagtaggacaccttttacatcataatccttcgataatctttcatacatatcgttaaatgcagatttaacagattcttcatctttaagatcaattttgactcctcccacgtcagttttatgcaaaatctgtggggaaactattttcgctaccaatggaaaacccaattttcttgcttctgtgactgcggagtctatgtctttaaccagagcaaacccggggacgctaatgtcatattcagaaagaatgcctttagcaatttcttcggtaatgactttggttttatttttaaaagaatcctcaaatatcgatttgattttgttttgatctgtcaataagagttcattattctattcggtttataatttttcttactttaagttttgagttttgagatttgaatttttagaatgtaattcaccatctcattgaaacaataatcatatatgtgtaaagacataatggtgataaatcattgttatgaaatgattatttataagcaattacaattatggcccctcccattagctttttgttaaactctaccttggaaaatgtatttaataacaactcatttagatctttgtttcttggccatctaagaaatgtaccatataaagtacggaagggtaatccttgcctcccagcggctaaaaaagccatgataacaaggaaatactttagataaaaggatacaaggaaacgggccagaaaattatcaggttttccgagatcaacaattaatagtctgccatttttttttaaaaccctgtgaatttctacaaacgactcatttagcgcgatcgaatctcttatcgaataaccacataggaccgcatcaaatgaattagacttgtatggaatcttttcaaaaataccactacataaaaaataggtattatcatacttcttgaacttattcttgatttcagccaacatttcaggaataggatcataaaaatttatggtaacatcttcagaaacgatatccagtaccagttttgacatgttgccatatccggagcctgcgtcgaggatatgattcccagggaaaacactttttcttatcccttcttttcgaaactgattatcttttcccaatgaaatagcactatttaccttatcataaacaggaatgatattctgaagtacttttattacttcattccaatatgaattccccaatccaatattcttcaatgtaaaaagtataaggaaaccagatattgaatttttgtatcaattgcggtcataaagatattagtcaagatgtcatcaatagtcttatagtggatgtgttgtacaatgaaagactcattaaaatggacgcattaaatgcaattatcgccggaatttccttctttgatacagacgtaagaaatatctataacaagataaagtcagaggataaaactatcaatataatatttgttaattcaaaactagtttatgggtttgaccacctacttggaatcttaaagatcattaatgaagaggaaaaaagaaaaatcaaatcaaacataaaaagcgtcgaaattgaatttttacttagaatctgctacacaaatcaaataaaagatgctctaaaatcaaactttggagataataaaaataagacttttgttgtggtattgatttctaagcttggcaccaaattgagttacactctcgatgctctcatgtcttatggcatcgaagatagtaatttgatacacactgatatcaccaagaaggattacattttcaatcacttctttaaagacaaattcaaagttaattcctatttgttattaaataatgaggaaaaatatttaaaatttcttattgagaaagcagccatatccctaaattgagtgggattagattagaaattagccgggttattgttaccataatttaattctattctgaaacccttttttctgtcattgaactaaacatcatgttggaactgataaccgatattcctgaatattttccaataatctctactagcagaatccaagtaggattggtcaaattgatgggataattcaaatgaggtccaactgaatcaataatgtctttcttacttaatttggtatgccttttttcaactagaattttaactggtcccttgttagcaattttctctctagccaaatcaagcaagcaatctctaatttctgcaacctcgcttagcaccaccctctgtattggaacatatctaagcagatttcggatctcccatggtgaattctgcagcttttccctcaaatatggtacgaaaagttctgaatcctttgaagattttcctacaataagtcctgagatattagtttcattcacttccacactagtctcgccaaagtcgtaaaacagtccttctagttcatccatcaggtcttcctccttgtatctatacgttgtagcaagaaaattgaatatcatagttctgctccgctatggactactaagcgccgctaggatttcttcctttggaatggcaccttctctaattatgcgaggaaatcccgatccagaaacatccactatagttgatccgctattgctgtctgataataattcattagttaccacagcatcgcatttactcaaaatagtctcatcaatgtcttctaatctcgttgagggaatcttttttgacaaattagcgcttgttcccactaataatttagatctagtcatatttatcaaatttaatatgcatgaattaccaggaatgcgtaatccaatagtattattaacattgttaatcacatatttagacaatccatggtttgctttcaattttagaattagagtcagttttccgggccagaataaattttggagtatattggcatgtggagtaatatgtgaaattcttgagactattctccagtcacttgtcaatactggtagggacttatccaatggtctttctttgatagcaaataaacgtaaaaccgatttttcatttgtggggtcgcaacctatgccaaaaacagtgtcagtaggataaacgatcacacctccattgtcaattatctcagagcatttttctaagtcgccaatattcctacaatccaaatgaaagatcaatagtttggagaacttgcaaattcaatttaacctaagctatcaatctaccttaaaacaaaaaaatattaaattgaagacttttcttaaatgttaaatacaattactataatataccaatatttaaaatcttcaattcttttagaaaagcataaatagctaacttgttataaattgtcaatacaatccaatattgatatactaagatatgaaaattatgaaaagatagcaagaatgtactaccaattcaggatccaacatcaaagggcattgggtagtagcagcaatagcaacagcattcaaacatcagacatttgtaaaaagacaataactattgttttttggggtatcagcgggttttcaaagctaacatagttgttttatttgatggattgcgaatatattatactagaatttttagagaatatttagaatttctagcagcataattgcgcataataatggagtattggacaaaactttcggggatggcatcatgtcatggttcgggttctttgagaaaaatccagcagaaagaactaatgagaggattacggagcattagaatccataaatgctgcaattgaactaagaatagattcagaacttaaaaaataaggtgatatcagattggaaaatagatggaggatgcctagattttaacataaagtgtggcatcaatactggccaggttcaaataggccgtgtctgatcaatttacaaccatgggcaccaatgttaatatggctagcgggctacaggaatttgccaaaggtgatcagataatcatttcaaacactacaatggaaatgattagttcgaaaggttttgatcttaagagaatttctgttggttcgaacaatccattaaatcacttgaaaacattgattgctgttatgaaatcttattttgagttagaaaaaaagaggtcaatagttttgtggggcttttttttggaataaatatcaactatatatcgtaaaataacaaaagtatttttatttgcaagtgaactatatcatcaactaataatacagatcaaaatgatagaaaaagaaagtttaggtttaaaaggaaagggtataaacgaggtttttcttagcgaaaacagagatgaatttgatagcactgttaatggttattatagactgattggtggtgagaatggcagttacaacaaggaaacaagtaggaggctacgggcatttggtgaagaattgttcaaaaagagatcatatgagaaatttacagcctttaaggcagatcatgatgatatgataataggtaatcatttaagattattttcattttgtgaacatcatttgcttcctttttttggtgaagttgccatcggatatattccaaataacaaaatattcggcctctcaaagttccagcgactagtggacaaagtttcctctagacctcagcttcaagagagactcacgtaccaaattcttgaggaaatcaaaaatagacttgaacctaaaggtgtaggcgtggttataaaggctattcatacttgcgtttttgcaaggggtactcaatcgagttcagcagaatttacaacctctgcagttgatggaatttttaaggaaaatcacaatacaaagcaagagttcttttctataataaattctgatggaagactaagactgtaatattcttatttattaagagggtaaagttgatctaaattctttttgtgcaccccgagtcgttaacctattaacctgtgcaacattaatcatgatacagcatcacaatccatttttgtaatttcttggtgcatatatcatttggacactacatgcatgtctacgatatattttaattagatagatgagcgaggaaacctaaattgatgtctgcggccaacgatgcgaatatagagtatattgattggaataatgcttttgaaatattagataaggcttttaaacttggtatttttgtcctaataattggtccaaaagggactggcaaaaccacactcgttagaaaattcgctaagcaggtaaataaggaactatcatccgtaaattttagcctcaggaccagagaatcacacttaattggaactcacactattgataacggtcagataaattttgtaaatggagttctggttcactcgatgacacaaggaaatttgttatacctagatgagcttaatgcggccgaaccggatgtgctccttcgacttgatgaagctttggatgatagaaggcagattgttttgaaagaatttcatggacagactataaaggcaacggacaactggtttgtaattggaaccatcaacccattgtcgcacgttggaacaaaagagctcccaccacagattctaagcagattcccaattagaataatgctagactatcctcctgaagatactgaaatggatattatcaaaaagcatgttaaagtagataatcagaacgatgaagataatattaaaagtgctataaaattagctcacaatctacggaaggcagcttctcttgaagaaattttttatagccctagtttgagggaaacgatcgcatattcgaaattggtaacgaacaacacaaatgcaaaagaagcagctgaatttgtatttgcaaacgtttatcatcaatggggcgaaattgagtaccgaaaagtaatggatataatagcatccatattcatttagttcatgttggcagagtatgtctattttttggaatataaaagacaatggcaaggacaatgatccaaaacgtgatgaaactcatgatgatgaaataaagaacaagcattacaagaaaaggtccgaatcgtttttaagatttgatgacctcgatcttgaaaatatccacattagaaatgatgtattgcttgagattgccacattcttatctagacgatggtcagacagtaatgaatcaaccattcatatttcaagagaaggtaaaatctcaactaatctggacaaaaatagaattgtccttccgggattagattatttctatggtaacatttttcaaaagtataggcaatggcgcacattactatggtatgaatcagtcagattaaagtattcatttaagatttttgataccgacgtcgtctttggatttgtgtttaacattttagagacaaaacggatagaaatattgggattggaagaatggaaaggcatgataaaagaaattatatattacgagggattgtcttggcacaacaaaccactactaaattcacttcatgggaagaataaagtgttagaagcattttctcagttctttctaacaggctatataaagggtgaactatacggtggcgaaaacgaaagggtaataagtgcatcaaactatgcacacgacattctaagagactatatcaagaaattcaagattaataataaaacttttgacccgataaaggatcaaaagtggctagaatatgaaacaagacagataattaagatacttcaggttgattcactaatgtcagttccacccatcccgattgttatgccaaagagcaaagtggggctttctatgaagcaggaggaagttttatcacaaattgaaaagcttgtgaggttaaaaactaaagagttagaaatagagaaactaaaaaaagaaattgtccaaggcgatgatatcaatgaagagtttagaataatagttaatgagagcaaaaaaaatgataataaaggttttgaatcaactgaaaacctttccattgcaataccagacaacttgggggttgatgaaaccgccatttacgattttgatctaattaataaggtgaaaacggctctcaaggaatggagaagcggatggaaagaaaaatatgattttagtggagacgaaatagaaattgaaaattacattgaaaagcagtcaaaaatttttatcagtgataagaaaattgcaataaatgtaaagatatcagtgcttttggatctttcaagcagtatcgaggacaatgaaatagagtacaaaaaagccacagtagcgttgtgtgaaggattagaatatctaggaattaagttttccatatatgcttttaatactgaatctagaatggttaaatgttgggtcattaaacccccaacggcaagatggggatccatatatgcaagaagactaatgcaagtaaaaccaataggaggaacacctttggcagaaatctacaagatacttgagccaagcatcagcgccttcaaaccagatattttcgtaacccttacagacggcgaacccgctgatatggatgcggtacgttcgatagttttgtcatacaaaagaagcggtgtggaaatgattgccatcggtctgggctcggatttaggagatgcgataggaattggacataatttgaaataccttaactatcaaagaattctaactttatcaaaaaagaggttgcaggatttaccaaaaaaagtattaggacttttaactacagaatgatgcaatcccacgttagtgcaccaaaataacagttaacaaattagaatgcaagatcagggttttctttttctagttttttccaatccgacaggaatgaatctagacctttatctgtcaatggatgacgtatcatcttgtctaagatgtctggcggaagtgtaacgacgtctgcccccatttttgccgcttcgatcacgtgtaatggatgacggacgctagccaccaatagctgggtcgagatatcgtagctggcaaatatttgaacaatttcacttatcagattcagaccctcggatccaatgtcatctaatcgaccaataaatggacttacataagtagctccggcttttgcagccaataacgcttgatttgcagaaaaaattagcgtcacattagtttttatgccttttttggtgagcgcatgcacaacttttagaccatccatggtcataggaatttttacgactacattttccccatactttgctaatttcaacgactcttccatcatcttaacaaagtcaatagcaactacctcaagactaacgggccccttcataatttctacgatttttttcatggtcttaatcgggttgcctttttcttttgaaagcaatgttgggttagtagtgataccatctactacccctaattcattgtatttttctatagattcaacattggcagtgtcaaggaagattttcattttgtttcacccttttttagagcaaccacattctttactatttcccttggagataagccatatttatctaaaagtgaatcgatttcctcatctcttgcggattcaccatacctgtctctaatgccaatttttcttacaaaagtagggcatatttcagaggtcacttctgaaattgcagaacccagtccccctactatattatgttcttctatggaagccaatgagcccgtttccttcgtacatttataaatcaattcagagtctatcggcttgatagagtaacatatctacaaccctacaagaaatattatgatcctttttcaagatttcgcttgccctcagtgatgctgagaccatagttccacaggaaaataaactgatatcattgccatcttttattatggttccctttccaatttcaaagttggattcttcagaataaatttcctcagttgaaggcctagctaaccttacataaaatggacccggtatattcactattttttccaaaagttttttgactgaaatcgcatcggcaggtaccaagacccgcatatttggtaaagatctcataatagagatatcctctatttgttggtgagacgcgccatcaggtcccacagataatcctgcatgagatactacgattttcacatccaggttgggatagcaaatcgcatttctaatttgatctaaacacctgcctggaataaaagcagcataagtactcgcgaaagatactttacccgctatagaaaggccagctgcgatagaaactaaattagcttcggctattccaacattgaagagtctatcaggaaatttttcaccgaatttttttgttttaagtgaatcagtagtatcaccccctatgcatactatgttaggatactttttacctaaatttacaaggctatctccgtatgcggatcgcatatcagaaaatttaatatcactagtagtcaaatgggtcaattcatagttcaccattatacattatatcttttctttcaatatcaaacatttttgaaccctcgtcattagtgttcaattatttcgataaattaaattgttctattatgttcctacgacccttaatccaatcttcttcaagatttaatgcccgggaatgatcgagcaaattcttttccaggtaggaatcgagtaaaaacctagtttccctaattctcttgtcaacatcgctgtaaccaaatattgcatttcccattacaaatattctacaaccagcatcaaagcactcagttatcgtcgacaaatctattccaccatcggcctcaaaatagcccttaaatccccgctcccttagtaaagggatagcctttttcattttaggtaaaacttccggaatgaatttttgaccagcaaaaccaggatttacagacattattataattacatcaagattatcaaggtaggagaaaatccattcgggaatttcggtgccaggatttatggctaggccagggctaacaccacttgatactagtttagaaatgatcctctcaaattcttgttcgttactacaagcctctgcatgaacagttataacatcacatccggcatcgatataccgatccaagactaaatcaggtttttcgatcatcagatgagcatcaaatggcaatctggtcccatcacgtaatttcttgatagtatcaaagaagaaggtcgagtttggcacaaatattccatccatcacatctaaatgtatcatatctgcaccatatcgctcggctgttgcaattttctgtttcaaactttcctcactggttccgtcagctcctgctataatagaaggagaaatcatataatccccttccagttcccttattaacaacggtaagtgtttctttgaaggggccttcccatgccactgaggattgttagccatatgttttatcccgttccctttcaccgtatttgctattattattttgggcttatcgacaggcctttttaaaagctcaggaatcagctgttcaatcttatgaccattaatttcaaccacttcccagttaaaggaaagccatttttctttgatagggtcaattggcataatctcttcggtaaatccatcttgctgaatcttatttctatccaatatggcaataaggttattaagtttgaatttagcagcagccattgacgcttcccatatctgaccttcgttagtctcgccatcacccaggagacagtacaccatattgtctcgcttgtcaagcttattagataggcatataccaattgagacagaaagacctataccttcagaccccccagaatattcaattcccggcacactgtgatgcttttgcatttcgctatatcttacaggatggccttgtaaacgtgaattcaattttcgtaaagtcttgatttcttcctttgggaaagatccagctagggataaagtagcataatatccaggtgccgaatgagcctttgaattgatgaaatagtctcgattaggattagagggatgtttaatatcattattcattatctgaaaataaagacagcccataatctctgcagctgaaaaagatgctccaggatgtccagatcctgcttctgcgatgccagttaaggctatatacgtaattctttaagtttttcctttaatttcaaatacctatttatcttgtacatattatcatcaaactcttcatccttggcatgcccaccactccatttcaaacatctccgtataatagttttcaaatgtcaaataaataaaaaggtagcttcgtatagaaaacgattttacatttgtgttccaatactagacaaaatcgattccatatctctcttcgtaagccctattcccattttggcatctctacgatcctttattgtatttttagagaaagcgattaaggtcggtactgcgttgataccatatttatcccacaatgggttttcatcctcgtttatttttacagtaccaaaaagaatattattatcgctcaaggttttaactgaattttcaaatataggtatgaaacttttacaataatagcaccaatcagcataaaacaaaattaaggaattttcaccactcgtggcagagtcaagttcggcctggttaaagtctttcatattgtaattttgtagatgtatggtaaaaaatatttgcaaaaatgacctgggtagttgtctttctaattacggttggttgtttggctgattcagagtagctgattatcttttgatatactaaaaaattttgcaccagaaaatcacaatcatctactaaaaaagagaaatgtttacgccattattgcaatatttgccattctcattttatgccaattgattaaagtaaaagattggaaatgtactggattagatggatagcttaaaaaacgcaacatatcatccaaataccttttatctttttcttgtttgctatcttattggtttaccgaaatcatcgttatctagtgcgcctttgaaaactttattataacatgcttctgcattatcgaccgagaaagatccattatggttggcagctcttgtaacacaattaaaatacctagttaaagcgtcagctggttcaacgaccattaattgtgccaatatcaataccgagaaaacaatacatgatatttttaatgcagtttttaaattttggttcatgatcattgcagattattcgcctccgaatttgatatcttcatcactattatcatccagtggtgcgcttcccaaaagaatttcatcataacaactttttacttcatgtttggttggttccttttcaaagtatgaatcttcgtcatcccctttgcttgaatctattttttcatcaatgcagtcataaaattgtggtaatccgctatctaaggtttggtttccactattaatttctatcaagtccacggcctgagagtacgccttctctgtatgcagcggggttcctaggatacttgaaatggtaatcataagagctgaaaatactaacgaatttatccagagatatttcatcctacaaaaagttagaaataaattatttaacccattctacaaaatactccaaatgaatcctcaagaacaaagtatgttcagtaattcaaatgccactcaaactttaaccaagagactcaaataccattagttgtgttgattttatgactggtttactcgaatatcaaaatataacaactattttcagttttttcaagtcacactgtaataagtaaaccggagaaatatcttcacaatttgagaatcagaaatatttgactatggaaataaggtaattgttttcatcatcataaagaatttttgaaaagataggagaccttttgtgtgaaaaccttttacaaattaataaatcctttaatattaaatttcgactgatcaatgcaggtcttgtacttcgttatttgtcatgattaagataaggtgagatcatcaagttatcgcacgagatcccttttggttgatagaatattttaaaatcaaatagatattgtgaattcataatataacgaattaaatcaaattttcaacctaatcttctagaaatgaaacacgcatgaggtatagaatataaatataatcatgattatagtctcatattgatttttttgtccaaaatgaaatatttctggttgattatgatagtttttacaagtttggcagttattcattctcctcaagcatttggtcaaagtcaaagcttagaacaacatctaggtttgtttggcaatgggaataactcattgttaaatgatatattcaataaagtaaaagattctgtggttcaaataagtacagaatatcaacctatagatccttctaatagatcttacgattcgacgggtaatagtccatacgcaatgaagtttggttccggatttgtttacgacaaatcgggcaccataataacaaactatcatgttgtaagctcggcaactaacataattgttactttcaacgatggtaacagctatactgctaaagtggttggtgtagatccttatggagatatatctatattgaaactggataatccggtggacgaaaaattgattccagtaacgttatcaaactcttcttccttaaaagttggcgatccggtgttggctattggtaacccatatgggctcgataatactctaacatttggtattgttagtcaaatcggtagattattgccaaactcagacttgggttactcaattcccaatgtaattcagacagatgctgctattaatcccggcaattcaggaggacccctgatagaccttgatggtaaagttgtaggcatgaatactgcgatattttcaaatacaggaacttacacgggagtgggatttgcaattccttcaaacgatatcattagaataatacctcctttaataaaaacaggtacttaccagcatccctggttaggcatatcaggatcaaagttatcacccactttagctgaaatgtttggattacctcttaattacaaaggtgtattaattgaggatgttgtgcaagatggacctgcggacaaagcaggtttgaaaggaatgttaattcaaggaaacagatttggtgaacaacaaatactagataaggatattataattgcaatagacagtaatcctgtttcaagaattgacgatataatttcctatttagacattaacaagaaggtaggagacaaagtggatttgaccgttaaccgtaatggacaaacaataaaccttgtcgcgactttagaggccagaccgaatttgcctttgcaagagattcaatcacaatcggaacccaattatgacaacccccaaccctataccccgttcccaaatttcaaactaccaccacttccagaatttaaactcccagatttacctaattttaacatccctggattatgatataatagataaataactactttaactttgagcttacatactaatcatcttgtttgggaacgacctgatcaaaattaaataatttaaggatggattttctgtatgtgaagtgcatacgttagatggaaggtagtttaggtttagatttagatttataaaccttcatttctttcatttacaatggatatatgtctgtgcaaaaagtggcttcaacccctcttgtcaaaataaacaatgtcagttacagaaacggctccgaagttattttagataatatatcctttgaaatagatagaggagatttcttaggtattattggaccaaatggagcaggtaaaactactctatttaaatgtctgttagggttgaacaaagagtatactggcaatataagattatttgataaagatataagaaatcatgcaaaagagatttataaaaagattggatacatccctcagtcaaacagttttgatcccaggtttcctgctacagtaaacgaaataatacaattaggttctgtcggggggaattcttttgatgaaaaaaaagttaaagaattgatagaattgacaggtataacggaatatcttaataaaagaataggcgatctgtcggggggacaacaacaaagggtcatgataactaaagcacttatccacgatccagaattactaatattagacgaacccgatacagctatagatgcagctgtattgaaattattttacaaacttttgacaaaactgaacaaggaaagaaaaattaccattatttggtcttcacatgatctagatgcggtgagtttgctttctaataaagtggcttgtctttatcggaaacttttttttcatgggatttcagaagacttttttagtaatgaaagcaacctcaagacatttgcagaatcatcaatgcacatccacataaaaagccattctcactaatcatttcattcttagctttactttttttggaatgacattttgaggacaaaggaagaaggaaaaagggacaagacgtaacttgtctgcatagtggctttcacgcaagtagttttttaaaacttttatttactttatttgaaagtaacatagaatttaatcagattcataaccatgataaagaaaaagtacatcgttagtttttgcgatcaggaattaccgatttgcattgaaaagctttataataatcaaggaattcaataaattgatattttaagacgagctgaaacaattaagtcaataatcagaatttttcataattaatagaagaataattagtctttttaattgatgctcataaaacggtatttgttcgtcaggctgaagatgataacaccgctggctaattctgtctagggaccatgataaaagacataataacaattttacatttatcatataaggatttacaatagaattgaaagagaacgaagcgtatgagaataaaccaagcaagacgagaagcatcacatttaggctcgaaagctcagttatagaagaattacaatttgaagctgattacagggaaacatctttgaatgtacttattaatcagattctacggagatactccaactgggagagatacgagaataaaattggaatgattccaatacccaagataatactgtcaagtgtgatggatcatgtaatcagaacaggttctgaaaatggaattgaagatatcttaaaatttaaggagtcattagtaaaagaactttcacaaatagccttcaactttttaaaggattctgtgctcctcataaagaaaaattataatctcttttcggtcttagaggtactcgaacagtatatgaaggtaataggaataaattcagatcacagaatcgaagaagatggaaaacacgtttacgttatacagcataaattaggagaaatgtggtctctttttatcaaggaattcctcatacttatattcgaaaatttgggtaaagttaaggtggatatatcaagtacgcctaacacaaccgtggcgaaggtattccttaattcctgatacattgttgtagaaataatgatattatttacattcctccaatcaatgcaaagacatcataccagtaaaaatttctattaatagcaatttatggactcgcactgcagccatattcctccctccccctcattgacatatgactgtttcaaatcattagaaagacaattcaaaaccatatagtaggaggtcaactgagattattatcctttcatgaccattgctgatcttttatcaaagatattaggagcaaaaaattttggattattagatactcgttagttatgttaggcgctgttaacttaggcgtttggcacctccttgttgtgtatttttacaaatagattcaaccagtttttgacatggtctagtttacacttctctttactacatggaaagtaatcgtcaaatccttcagttcgatccttgatgtactgcatagttctttcaatcagacttttctcaaacgaagaattgatatggtgttttagttttaggaatctacaagccattgggtaccaggttccaccgtctgttgatacgacatgttttccgtgaatcttgatcagacctgaaataaatctctctgcgataagcatgttcctctccttggatttattagctaagaaagagtgcgagaatttgcctattttctggttcgattgctgcccataaccaggagtattctgagccgacttttattaatgtctcatcaatgaggtattctgatatttttgttcttcttgttgaaacctttcgaggtttatacctttgaatccaattccaaattgcaacgtgacttctattgataatatgtaaaaaggacaatgccttggcagtatttctaagcgataagcctagaaagtacaaatacagaccatagtaaatatgctctgaagatgttctctttcttttacttaacataacagaaatagagcgtctttaagctaaagatttatcgttaagttaacagggccttatgttatgacattttgatttttataggataagattttaaaaaaatcattggtttggagggcgtactaccttatcaagaaagacaactatctaaaaatttctacactattaatttgtatattttcagtttttgcaataatactaaacattgaaggaagtaattgtattgttcaaatcaattcttcacccatatttagcaatagttctaacgaaaataaagaagttggtaataatagtaatttcataaatcaaggagcagaggtgaagcagcaacagcaacgaggagatgagcagctgcagcaaaaggatgccaatagccagtctcaagaggcgttgatgcagcagtcctatgaactccgaaaatattgctttttagtgacaaatttgtacgtatactccctatttggaatcataataggtttcataatacttgtactttggtatataagatacaaaaaaatttggtcttggaagaaaaatggccccattaactaaccgatttgaaatttaagaatttcagctatttgcatagatttttaaataaatgggaactaatttcacacaaagattgtctcgcgcagattctattctaaaattggttaaaacctcttatgctacatcacccacgtttaagcaggccacttttttcggagtgccacataactacaaggatataaagacgctaagagattttttagaaatcaattacaagtatcaaccagttaagaatcaattaagacagaacctcattgctaaaatcaagaataatgaaaatccattcgtagggattattgggtttgataatacagttatcccagccataaagagagcactcttggcgggacatgacattttgcttgtaggccacattggccaaggaaaaaccaaacttgctgaactaatttcagagaaccttttgtcacctattcccatagtggaaggaactttaacaaatgatattccaaccgaaatgccctatacccatcttgtcgatttgttaaacggaaatgcagttgataagatgcttccagaattttatgtttcaaaggactgcgaggaaataatcaagaataatggtttagacaccaaaataaaatggttagacggtaaacaaaggtacagatacatactggcaaccccagacatctctgttaaggatctagtgggtcagattgatgttgttaaaatcataaaaaaaggtattgaagtttttgatatagattcatattctcctggatatttacttcaagccagatatgggattttatgtcttgacgagttaccagttctagatccccggaaacaagtaacgttgcttagcgtgctacaggagggaagatttaccacaggcgcttacccagtatttttcaagccggatgtaaaaatcattgctactgcaaatcccatagattatacgcattctggaaagataatagaaccattagcagatcgtttaaagagccatatcgagacacactatcccaattcaattgatgatgaaaccttaattttggtacaggaaatggacatgttaaatagagatcaaacatttttgccaatcttcatgctaaaaacaatcaccaggattttccaaaagattagaaaccatcccgatatcaatagcgacagaggagtgagtgtacggtcaaccattcattcccttgaagcagtcatcggtgaggtagagagggctaggtctctggtaaataacgtcaaaacaataccaagattctcagatctgcaatgtatattccaatcttcaaagtttgaactagatgaaatagaagatacgacagaaaataagacactatttctaaataatgtaatcaatgaagtcattcaagagatatgtttgcatttttttaatgaatttttcaacccccaagaactagtatccattaagaatgagtttagaaacaaatcatttattgtagttcaaaatcaatatcaacacgcaacagcagcccaatttgtatatggggaaaaaggaacgaatttggaaaaagaaaaaatgactacttcgtacttatatagggatcagttgagacatcttccagtgatatttaagacattaaaaggcgtaattgctaaaataagacaagaacaagatcactttgttcaaaaggcccgtcaaaacgagattagcaagaatcttcaatatatccagtttggagatgcatggaatgacacggaaaacaataacgaagaacttttagcagcatcatcggagttactctttgaatatttaaggtttagttccccaccaattctggataagagggaagataagttcgagactagagaataaacaaattgaaaggatcagaagacaagctcaatagtaacagaattcgtactgataatagtaacaacaatacaaaggttagtgaccaaagtaatagatacaaagatcaaatgggtcaaaacaatgcagtcgtgcatgagaaaagaattatctatttttcaaggccctttgtaaattatgacgacggggatgatgaggacaataacagagcaaaaaaaaatttaggaaaccgccagaatcataattcccaacaagaacaacagcaatcctcttctgaccaggaaagaattcgagccagaaacaacttgttgaggcagttttttccagatatattaaaagcgataggcaacaaagccattaaagatagtcctccctctcttcaagaactggaatcatatcttcaagattattttgttgaactacaaaagagaaagattgctgatgaaaatgcaaaggttcaagaccatttatctaggtctaataaccccaattcaacaagtcaagaatacgatagcagggagcgggatagagcacattatttaagaaaacaggatgaatcaactggatcagtcaccaccatcagtcagagaaactatagattaaattttaattttaatgagcatacattttcagataacaatcttccaattgttactgaattgattaagaaaggttatctagttgattcagataaatggttaaacaagaaagggtttctaaaaataggtcaacagatacttacggagatcataaagtctttaaagacagacaaaatagggatgcacgaaacaaaatttgcaggttatggaagcatggtccaggaaacatccaaaaagtatgagtacggaaatgatatatccaacatcaatatcaactcgacaataaggaattttgtagaaagatactacgaggatcatcgccagattaatgatgaccttcataacagaattgagtttccattggacatctcatatgaagatatagagatttatgataatctagaagaaattcaagtagctactgtttattgtattgacttgagctcaacaatgaaatattcatcgatgtacaatgatcttagtaggatagaagcttcaaagcgtgcattgtggagtttgtttatattaaacaagaaatttttccctctagattctatccatacgatcggttttgggtccatagcctcacgaattgatccgatggatattccttttttaaaaacatttgaacctaatgcagattttctacactataccaactatcaagcagcatatagatatgcaaaaaggattttgaagaaagatggcgctaaaaacaaaaggattgtaatgataacagacggccatcccagtgcatgttttatagatagcaagaacgagaaggataagataatgaaacaaagaccatattcacatttttatattcctgataaggatagaataggctctcagaattcagagaataatagaataaaatttgatattcatgataaacaaacagtctacctgtgctataggtataggcagattgaccagtatatcggagaacagacaattaaagaagcaaagaaactaaaaaaagatggtatagatcttgatacaataatggttagcgaggaggataccctacttgactttgtaaacgaattggctaaatcagttgacggtaaatcgatatatattaatcctaaagaaattgacagagttcttattaatgactatttatcaaacaaaaagaaaatgataagaaaatagataggattgtttacttagttctctacaaccagagtagtaaagcaaaatcaaaaaaataatcccctatatggtattttttaactgtcttttgttaattaccgccaccctgcaaaagttccaacatttttaaaatatcaactgtttcgttcttttgtaaatcaggcatcataaaagagcttgaggagtcatttccaaatgaaccgttattataaaaaccaaaatcggtgtcattttcctcaccgctactattactactactaacaacaccaccaaataaggcttcaaaagggttaaaaattgtggtatcgttagatgcggtgccattgttactttcgtttaaaaacacttggtttaaaaaggaggtaccagattcattggatggaaaaaaagaggataatggcaagttgctaaatgaggaagagagggaggatggtgactctagagaagagaacggcgaatttgactgagaaggagaaagagaggatagcatcgcaaatggacccaacaactccttaaattttgagaggttaaattcactatttgaattctttgagaaattaagcattttggcaaggtcagaaattgaactctcattatttggtagagaattacccatgtcaaaagagggatgagaaaaagatcctccactacagagatctgatagaagttggatgctgcaaatggtttgtagattaataggcgggattgatttcattatggaagacatgtttaaaatatttccagaagaggaatttaagagattttctagcatattttcaggtgagttatttagctctgacttattaaacaaccctgaagaattatctgtaaaattgcttaaattcaaagtagacaataacccttgcaacacaggtactttatctttgagcattgctagtcctgtcgaattggtaagtacttttagagagtctataagattgtctgcatcaatcttgaaagaataaatcattttgttagttattgggagagaattctcatagtcagaagtatttacctcgtagcttattgaatatagtttattgtcaactatcatcccatattcaacattgtcaattgtttcattaccagaataacttcttgttaccaatttataagctggatgacctgctaacaatgaatcagttgaagcttcgactatagtaatatcttgatcttctccttgtacagcatcggtacaatcttccaaataggcacttatattatcaggagaataaaaaataggaggataaaaggtttgaacgtaaacattaaaccatgaaataaatgtctctggagataatcctgaatcatcaacataagctgggaaaaagcttatctgttttacggtatcattagaattactttcgtcaattaagaagctagaagggtattttaaagaaacgccaacctcactattttcatagttattgaaaattatgctattgttgttgtcagaaacggaatttgctaatgctgctatagattcttgtgcaaaaaccaaattcgagttattaccattattaccgttcagcatattcgtattgaacatagtgccaaataatgaaatcgcaaatgtcaaaactaaaagagatgatgaaaaaataattacatttttactcttgttcatcaaagggtattgaattaacacatataaaatatttttccgtaggaaacaataataagaaattacaactatttaaaatatgcagataaataaaaagaaggatgaagattggaaatcaggaggatgagagataactgtgtcagttaagaaaaatcattttaatacagatataactgatgaagatgagatagatgaaataaaaaaaattgcagagatgttaaatccggatgaaaaggtattggtagttgccagacaatcaagatttaagcctggtgggtctcaactttcacccaatgtggtttatgcaactgatagaagaatcattttgagagatccaagtatgcttggactaaaacaagacataattgatattccttacaatgttattacaaacgccaaaatagaaaaaggcctgctttcggcttcggtaatctttaatgctccaggattgtttaaccccaatattcctgggaggatgccatggataaagagattagaaacagatgaacatggagaaaatggggttatcgatgctattcccaagaaaaaggcagaagatttgatagaggtgatacgtaacggaattacacaaataaggtcccccacttacccctcaactcgtactaacaatgtaagccaaattccccaacaccagagtcagagtcaaatatctcacgctgatgaactaaagaagattgcggacttgaaggataggggtgtaatctcagaggaagaattcaaaaggatgaaggaaaagatcatcggaaaggagtagattcatgcaactaaagtaaaacatagttagatagatatgataaggtaaaacataaggaaccttgtctttgttttaacttctatcaattttacagagaaaatgcaataaattaagaagccaaggcatgaccaaaaaacaattacaaaaacttttttgcttaatatctattttgcttggtaagaaattcgcaaatcaatagataggaaagaacctttggttttgttgttttatctttgtaccaatggccttttaaggcacatttgagtataatcttataaattgcttaaaagagacaaagattttaaagaaactcttgcacattttttaagcaacaagattagtttatttttatttttgtcaatagtggttgcaagtgtagccatatacccctttgttattccgcacctttatcacccttccatgatttatcacatcctcattcacataattagttttgacgtggcccttttcctaactacgatttcgtttgtctccttcaagaagacaaaaagtaaaaaaatactcttgacaggccttagttttggatttttgttaattatagaatttctgtatttattacagtcaagtcgtgttttgggaacattctacatacctttaatagaggtagaatttcaacatgtattgttattattgatgttagtattgtttgctgcaggggtattgaggttggaaagaaaatgaatccgagcacgataattaatgagaaccaaacagagtcaattggaaataacagaagtacaatactcaaaattatcaactcctttccagggattaggtacagagatattcttagaataacaaatcttaataatggcaccttatctcatcacctatcaatacttgaaaaaaggtcaataatcaaaatcggccgaacagaaaatagcaatattaccagatactttccggcctcgacaccgtcggatgaaactctcatactaaattacctgaaaataaaaaccactaaaggtataatcatgatgttaaatgataccgaagacgtaccctttaatgagattgtaaagcatatcaataaagcaccgtctactacttcatggaatcttaaaaggttagttgattcaaatatagttggaagaaaaagaggtaaagaggtttcattattttatcttcttaataaaggactggttaaggaacttgttggtcaatataacaaaactttacttgatagaagcattgataactacatatcaattatagacgagttataaaaaacattattattatctagcgctaaaaccattcctaacctcttttccaggaaggatacgatacaaaaagatactaagcaaaaatcattgactacaacttgtggacattaagaaaaaaaacaacagtaatatctttacttcactttgctttatacttaccaatatgaaccacttagatgatggaccagataagaaccgtgaaatcaaagacaaattagagtatctttttgagatgcaaaactccttgataactcaagattataacagtacaaaaattaaaagttctgaaaatattcctttagataataaccctgaaaataaaatgaagaaattgtacgagatgaaagaaccattttcaggatacaaaatatttatgatttcgtctgccttggtgcacgaagccatagaacttcagagggaaactaattggaaatggtggaaggaagataaaacagtagataaagaaaaacttcaagaggaaatcatagatttgtggcattttttaatacaactatcaattgaggccggctttgaaccacaaacactgatatcaaaatacatggaaaaaaacaaagagaatactggaagacagttaagaggttactaagaacaataactaccccactactcaaatcatatcaaatttgccaatctttcttagggattatcctagaatttctatttcgtcatattgatccttgactgccaaaacaaaaagatcctcctcaaatattaatagccaatcgcttgttcctataataggtaatttcctcaccaaggttttcccttcttttagtatggttcggacataagcatgggtgggtagctttgcatccttgtttttgactctgataaggtcaccttgcagtttaataccccgaataccgggttggatatttagttttctaatattgccatccctgtcttctatttttgaagttacataactttggccgatgtcaaaatccaaacaaaaagatattttgatcacgcacgaattactttgaggaatttcattttgcatgagttcagattcttcatcaaaatagagaccatctttcaataattcataattacagattattatttaataaaacttttcataatttattagggtttaaagatttctctatttactatagccagtcgctagaaaataattcagatttaatcctcaattctacgaagatattaatttacttattttttttctctatcgcaatagcttttaccaatcttaatatgacatgagatacgagtatatattgtatagagggcatgcaatattccaatataccggaccaagatatcgttataaagaatgtgacttttcaagatattcccaaaataattgaattgcaaaaggaatcttttccatccatgttagaagaaggtagtgtttggggaaaaaggcatcttcaaagtcacgtggaaatatttccagaaggtcaattttgtgttgaaattaagaacaaaattataggttcatctagtagtttaatagtaaagttaccatccgattacgaagttcatacatttagtcaggtgacaggcaatagtctatttaccactcatgacccaagtggcgattcattgtatggtgcagacatttctgttcatccggattttcgtcgattgggaatagcaactttactgtacaatgcaagaaaggatctggtcataaaatacaatttaaggcgaatcatagcaggcggtaggttgataaactattgtaattatgcggaaaaattctccccagaagaatatgttcaacatgttataaatggacagatttccgatcaggtgttgacctttcaattgaaaaatgattttaaattcataaaaatactttcaaattatatcaaggattctagatccctaaactatgcaacatttattgaatggataaatccttattataaaaagtgactcaaaccatcatagattgccatgtacacgtaaatggctacgaaagtttaaaaaatttaccactcaaagagagaatagaatcactctcaaacacaatgcagtcaaacaaggtagaccaggctataattatttcatcgtatacaatcaatgaagaaagaccctctacaggagaaatattatcttccgtcgaaaaacatgaaaaaataaaagtggtagcgggatactcaattagcaatcatgatgaaagtagtattaaagaatatgaagagtatcttaaaaatggtaaaataaaaggtttgaaaatttatccaggatacgaacattactatccgtacgatccaaagtatcagaaagttattgatttatgcatagagtatgatgtacctttaatgatacataccggagatacatatacacccaaagggaaagtcagatttgctcatccgataaatgttgatgatgttgcagttgataacccggaattaaagatcattatttgtcacttgggaaatccgtggtttttagactgtcaagaaataatttataaaaacaaaaatgtttatgcggatatatctggattggttttgggggactttacggagttttatgagaaatacctagtaggcaagattactgattttctcaactatgctggagagccaaaatatctgctatatggaactgattggcccatctctagtatgaaatcttatttaaattttgtatcaaaattagaccttaatcaacaggaacgagatttgatcatgttcaaaaattcacaaaggttgtttaaactatgatctgggatgctgtccattgaggacggcgataccaccactaataaaagtacagtcaatgattagttatttgtaatattagaaatattgttaaaagatatctggatattttgtttttgttgttgagatttaccactttaaatttgaatcagtgcgcagtcgaaatcccacgatagatatcaatcaaaatttttattgattttatttccatttttacaataaagtcgctagtctctcgaataaatttttttgaaatatgttaagaaaacttcttgaaattaagaaaagatgtacttcctttgttattttgcaattaaacaatgaatatttatgggttggtaaccagcacaataaagatctatgaggtcttaatacaactcaaaggttgctactgctgtttgtttgagactctacagtagtaccatttatcagatttctgattgattggttaacggtttcgcctgagcctgttgttccggagccagtgatgtcagaggaatcaccacctgattcggtcccttgacctgctgtaatacttccactatcatcctggtattgtaatgctatgttgttacctgacccagggtcattaattccaccttctatactcttctgctcgtctgaagaatcactatcagaacctacttgttcaggaccgctagactccgccattttgcatcggagattcggtatctgtttgctcaattgactcaactttagaagtattggaattgagattgatggatcacttccatgacatagaccattaggttgtgaaatgctactattattgtctttatatttaatattctttatatttgtaagtaacccatgggcaaaattctttaaccacccaatttagtaatatattacaatcaattagttgaatatatcataaatagcgccataataaatttatggtataaatatctaaaatgtttccatttttagaaaatttctaaaattctactgatataatgtgatgataataatgccaagttacagaattcaattggggtactggatatatcatcattgagttggtcttttaactttggacaataccctaatctttacattgtagcttggatctccattttgtaaatagatgtccgacttggaaatgccggcaatagtatttttcaatcttactcgggtattatcatcgagcagatattcattccatttttcagaggttgtagaaaaggttatctcctttttataggaagactccatctcctcctttgtatacattttcttatgtgtgggccctgttgatttatctgaaaaaatgaaggattggattgactgaaaattaaattcatattcttttgatttatccatctttgatttttttaccccggttaacactaccctacttttgagctttgtatcatcgcttaataggtatgaatcccaaaattcctttattaccttaaaatccagtgtaacgaaatcactcatctaggtttaatcttttcaaaggatattttaatcaatccggccagcaagctagctatcatcctacctaatcttaatagagtcaagaagtaaggtcgaaggtcttcttgcgtattttgttttagacactccccttattagtataaacagtgagatgaagacttgaaaagcgatatcaaaaattgaaatattttatatatgaataaacaaatgtcaataacacataaaatttactaccataaattgttcataccatagtatctaaaaactgaaatgaatttgtattccataatctaaagatgaaaagaaatactaattatgagttttttattatttctttaactggtttttctgtattcttgattttgtttcaatattattatgatcctttaggtaaagcattaactgctttatttgtatttgatttcattgtatccataattttgtcaattgacttcgctataagaataaaaaagtctaaacatccatccaaatattttttaactcatttgtatgaaattcctgccttaatacccttgtacgctctaaccttgttgcaagataacactgtatatggagctggtttaaagagcttgaggcttatacagcttttcaggttcttgcatgtcttatctagaactttgatcatgatggatgaaatcaaaaataggcttctatatgttgtttttctatccgtgattacggttacggctggtgcatttaccatgtatgttgtagagcataacgtcccagattcaaggataacaacccttgaagatgctttttggtgggcggtggttacagttactacagttggatatggtgatgtatacccgatcacagttgaagggagaataattgcctcaataataatggtaattggtattgcaattttaggcatattaatttcaactataggagcacaatttttagagtcaaaattaagaaatcaacgcagaagagaagaaaataacattaaagtactgatcaaagacaaaattgacagactggaagtcttacaaagtgaggaaattgtgacacttttaaacctcatatcgaatcttcatggggaactcaaaaacagtaatagcggtcaaatgcatggatctccttgttttaaatgcaataatataaattctcaaacggcaatctactgtaataggtgcggaagtaaaataaccactggtaacccataaaaggtattaaagggctggtggttcagcgtggtacgaacgttcgattcgcaatcgagagatcgcgggttcaaatcccgcccagtccacttttgagtcacttatgcgaattcccgtgtattattctcaggtttgttaggcatctgaagcaaagcttattcttttttatagtaactatggtaccataattttatatataataggaagacgtaatctctctgcaggacagacagcacacgggaaattgtatatagtagacgataattacattgaagtaaggaataaaaaataataattttattttgtttaagtaattttttgtcttgaagccacatcaatactcaaacatctcatttaacttgtgtcacaaaaaaagatcctaattaatgattcacctctgcaattaaaattctattgcgtattctatgcggtttatttacaaaatctagcaaaaccttatatttactgatattgtatgtagtcgagtaaattgaaagatggattctaaaaaaaacagtacgactcaaaggcctttagtattacaaggtggtggatctataggcgcatatgaggcaggagtttttaatgtgttataccattggatacaaaaagatatcaaagacaagaagaatgaaaacatatttgatgttattgcaggaacatctataggcgcaatcaatggggccatactggtgagtttcgttcaacaaaataatacctgggatggtgcatcatcaaatcttttgaaattctgggacgatctggcatatacccctgacctttactactattggccattctggaactactgggcattaccatggagcgagagctcttggattaacacatgggataaccaaaataataatgacccaaaatccgcaacaggagaagctgctcgcagatattactcatcaaaagattttatactgcatggtgcccccggcatgttttcgaaaccacaaaaaatctatgacgatcgttttcttgatagtttcggcgctccaagtaatgtgtggtatgtatatgacaataaaccactaagggagagcataatgaaaagtgctacttttccaatagctaccaattattatgatgcaaataagcaggagttaaaacagccccgactgctatcagtaagtgttgatgtagaggaaggagaaacggtagtttttgatagttactccaaggaagatggttctagatcaactgaatacacacaggatgacaacagccaggaacagcaaccacaatcaaaagaaggaaaaataaaaatcctctacgatgaagggctaatggtcgaacatattatggctagtgcgtccgtcccaatacactatgattatacatatgtgccaaaaacatatgactatgataaaaattttagtgatagagatagagacacaaaactggaggagttaaaacaacaaggaactgttgacaataactataaaagattttgggagggtggaatatcaagcaacacccctctaagggagcttatacagtcacaccaggaatattggagttattgggtcaaagaaaaaaagtagaaaaaattcctgatctggaagtatatgttgtggacgtgtggccttccatggaaaacaagaactatccaataacaccagactatgattctacagtcaataggaggaatggattaacataccaggacaaaaccccttatgacgaaaaggttgccaatatggtgtcagattactataacttagtaaatgagttgttgaaattggcaaaagagaacagcatatcagacgataaaataaatgctattttagataaaaaagaaaaagtgcacatcgtcgtggagaaccaagaaaatacagaagtttactggaggaccggtttgatattacaaaactaatacgcattgaaagaagtggagatcctgatgatatttcaaataaatggtgcgattcctctaaaaaaacaatagatggattgataaaacaaggagtaaaagatgcattgaaaaccttggttgatgatgatattattacgaccataaggatagacaagtccgaaggaatagacaatgtcatcaatcatattaagagttttattttagctgttaaagacacgaatctaccatatgataaaatgatgatagagattgcggaggctattaaaacaaaactacaaacaggcgataatatcgctatttctctgtgaaatatagctttattttcaaatcttatcatcaggtgtaagactaaaaatagtatatagtttaacttccatgcctatagaagtggtatggtattgtctgtactatttttggtatctcaatgagttagtcataataaatttacacatagcaataagatatcattttgtaatcttgtgtgtattatgtcactgatattgcaataaatttattgttaatacctttagtataagttactatgtaataagagaaccctcttaccacagagattttcttaaaaatttggaatctaaaaattaccaaggtcctggaattcttgtactgtaatcttaattaaattcattttagtaatctcaataaattgtaatggtgtttagtttgtgagtaattttcttatgtttctaaatcaatagagatttagattcttaatgcttatttggtaaaactatacaccaagcgattaatcctatacattgccacaatcgataatgcaatcactgatatttgcataatttttgaaattaagtctagttttcctacgtataattctacacccacaattgggactcctacggtccttgaagcgatatatgtagagattagagctattgaaactaggatgatcacaatataagggagtcttttgataaaccttgtttttaacaaccataatacaaggccgaaataaattaaaccggatacaataaatagtgtaatttcaacctgcttttccgttgtttcatcatgaataccaaagtttagtaattccatccaatcagtgtattccgcatatgcaactaagaagtagagtattcctgtaattgccataataccacataaagcgtaaattatcaataatttttcagtcatttatatcaccatttgtataatgtttttagtatgacgcaaaaaataagattatgctaggcctttctttgcctcttcagcgtgtgtcaacgctccgttagtgtccccatcttttagtgcctttagtgaagcttcaatatgtttttcagcaccgctttgatttggctggtcctctaagcttgcttcagattggtatagcgatttctttgcaccatcattgtccccggtttttatcattaaaatacctgtatcaatcgattttatgatttcattatttgggttgtcagcagaagtggtatttgtttgattcgaagacgttatggcaatgctattagtagcattactttgtccaaatgataagacgctatttgaaattaagagcaggggcactaaacttagaagggaaaataagataactttcccatagctttgtgatatgatagtcatttagagacaatctgattattaggaataataaactaattatcattcccatctatttagaatggtcaggaagaataattagaagtaaatgaacaagtattaattgtgtttgaatccctgccataatcgaactattttatcttggtgctctttatttttgatcttgcaagtaattctattgtttttgaaggttatttgaatctcgtcaatccaagatgtatagaaggattcatcagttccatccattttacgaataatttttgttttttttataatctttaattgctctaatttgctaacttttctatatgtcgaagatataggtatatctaaattggatgctatttgttgagtactgtattcttttccgtcaagtagtttcaaaataattaaactagtgttatcagtcaaaaaggttaggatatcttctggtgttggagcgctcaactcttcaacacggcaattattactaatacgaacccaaatatttctactacttcttcaatcagctccttacttttctcatccgacaaagctaatgagtcaccaattattgtatctcctattgttattagtaagaaacctgctgcaaggtagatcatcgggacatatctgctccttctataagctcgaatggcaaaataaacgagtatgaaccctagtattacatgaatcaatataactagattcattatttccatggctttacttgataaatggaaatgcgattatgatttaaatgttatattaaaaaaatgttatacggtttattcttcatctctaaattatatggattttgatactgtatattagtaatactttaatgattacaaacctgccatatagtaaaattagtggatgtttttcctatcggtttcgtagaaaaatctcgattgttcgattagtaacagccgtaatgaattctaattcttctttacataaatatttggaccatatatgtactgagccagtgataggataataaaaaatatgatttttacatccagagaaactggttgagcttttctggatgcaaacatcaagcctaaatgatgcgtataattgatcatctcattaaacttaaggattgtgccagatacttatgcttactctataatctccccattgcaattgaaatggtaggttcaacgaatcatctttcttgtaatgtagggacagctatcctgacatctcattaatttctcgcgataaaatgatattttataaatttatctatagttcctaccgattaataatagtcaaagattttattataggtcggcttctccttagctttagcgggttatcaaaaatatgaaaataaatattcatgtatttttgagtgttctaagtgctttagcattattaacttccattactttcattgcacctaataatgcatttgcacaacaaggttctttaaatattagtagttccggtattgctaatttgcagccaaatatcaatgcagaaagcatttttgacactaaaacaatgacgttaggtaacaatattcaaaatttcgttatacttattccaaatgaaggtcatcacggcgaaggtgaagaaaatgaagcccgtttcttagaccaacactttgtgcctgagaatgctgcagtcaacgtaggtactaccctactttggtttaatggagatgttggtcacgagcgtactatagatgtaaagggtagtgatggcaattcagtgtttaatacagggctattacagatagtcaaccatcagggtcatatactttcagcaatccaggagcattcaattatgaagcagaaggtgacccaggtgtaaccatgactggttctattagggtagggaatatccaatctccagtaacaccttctagctctttcacaaactcaaactctactaatattgacacggtaggagtcttaatggtaccaacacaagatatagacagttatattcagcggattactgattctggaattaccgtagataatacatacgactttaaagatttgagagggggacaaaaaggtactggagatacgcaaactttgatcgtatggaccaccgcaaatggaaaagacctaaatgaaacactttcatcattaagtgtaatctcagcaggtttgccttatagttagattcctccagatatttattttgatagaacactgctgtgaaattttattaaagatattaacatttcaaaaagattttatttttttaacatgtaattgaaactaaattatttagagttaaacgattttgctaacaattattacgtaaattcaacccgttcattcaactttcttgtagatttttatacaagaattaatatattatttttatggaacaaaaaccaagaccgatattgttttcaattattatcttatcatccatcatagctgttacatcatatgccactgttcaggtttatgctcaaggcagccattcagaatcagattcaacacccatatctgcagtaataatgataactgcagatgaccaagggaatccagtatttaaccccataaaaactaccataagacaaggtgaagaattattagttttgaataatttgtcaaaaacacatactttcaccaatggaaatggcactggagattctatggatggaaaaatatttacagtagatataactccaggaagtttttcagaatatctggctacaaacatttctcctggtaattattctttctattcaaaaaatgaccctaacctcaaaggagaattagtcattacgccgtaaatgtttgatccttctcgggtactgaatatggattttaattgatatgtgttactcctcatccaataaaatttcttttttctacaagatttaaacaaagtctgcaggtttttccattgactagactaagtggaacctattcctagcaacttattctttagttatcaatctctttacagaaaacaaatcagatatatgagaacatttatcgtaatatggctgattatgtgcaatatgaatccaacatgaactaaaaaattgaaacttgtatttttttgaataaaatattttctaagtaattacaatcttaaataatacttcagttattcgtattttttggtctgtagaacactttggacgatcaaagatatcccatagttttatggtttgttcattcatactcatttttaataaaggaaaatccttgtcaaggctcaacagttaaatcaactttgttgacttgtttgtttcttatgataaatatatctcttgaaatggttgaccaacttatctatagattaatagatgtcatccattgagtatgacctctggccaaaagcatcctaactatctctctactccaagaaacttgtttgtggaatttgttgggtgaattaccctttctcgataacttgtaaaaatgttctctgccattcggaacgtttagacaagggatcatgtcttctgtccttagtgggatacatataggattaaaataaaaacagccaaaataaaaagggaaatcacattttcataaagataaagtgataaagtgattatcctctaaagatttccgccataataataatttaatagagtatctagaaaattatttttatatctagatttaatggatttgtagttgtattaattcgcattctggttggataagtttaattgctcgctataaatgacaaaaaattacgatatccaaatgaagaaactgtctaataatccggatactaattatgctgttaaaagttatgaatcgaggtaacaactaattgactggatttattacttctttgacaaatatctattttctattgattgttggaagacaactctaatccaatttccatagcttcaggattatcagatctggaaagtaagatattttatgatccttcttagattcaaataattttgggaaccgaagcaacatagattaataaagacaaccatatccctcacacagtaacatctgttagcatcaagattagtcccagaagagaatttgattctagaataattaatggagataacagctacttaaatacaaatttaaacagaaaagaggcgtgaatttcattttactttatatccatggatgactgaaaaggtaataactgcatatcatctcaagttatgtaaaaatcaagtgaattaaatatttgaaataagaattttatccaaatagaattattttgtagatattattatatcactagtaattaatttttattcgacaacaaaataaactaatatttggtttcattttagaagttggatattcatgataatatttatgaaataccatataccactggtaggtacatgtttccaaaagctgacgatgtttcgattttagaatgtgtgaaggacaatgacacggtagcaatttcaggctttaacatggcaactacccccgaatttttgatcaatggactatacaatagatatcaaaaagagggtcatcccaaaaatatatttataatatcggacgctttgccagcagttccaggcaaagctttagactatgttgcagaaaatttgtacaaaaatcctaaacaggatttcctaaggggttctttgatgccttttttaggattttctccttggctgcagaagatagttatagacaacaggattgagtgttatggttggccaattggaatcacggcctattggtttagagagatagcctctggaagaccaggactattaactaaaataggtttgaatacatttttagatccaagaaatgatgatgccgcccttaacgaattgggcaaatgtaatctatcatgcaagattgaattattaagtattgacgacgaagactatcttttatataaagcaccaaaacccaattgtgctttaataagaacttcccttgctgatgaaatgggtaatttgtcaactcaagaggaagggatcaggggaacagttctcagtattgctcaggctaccaaagcaagacccaatcaaggaaaagtaatctcacaagtacgctggataacaaaagcagggacgataaatccaagacatgtggatgtaccttttccacttgttgatcacattataatttctccaatagaataccactggcaaacaggatctattccatacgatccaagactatccaatcaaattatttctcctatgtataataatttaactgctagtattcctctagaggaacccaaggaatatgaaagggtaatcgctagaagagtggcgctcgaattcataaatctcttcacgaaaaaacaggctcctgtattggtgaatttaggaattgggatccctgcattaatttcatcagttgctgccgaagaaaacattatgaattatataataacggttattgaatctggaccatggggtggagtagccttatcaggaaatgactttggattagccatgggggcatttgccctctccaccatgcccgacatgttttctaactttgagggtggaatcattgatgcagcatctctaggctttttacaaattgatagatttggaaacgtaaatccctcgatgcttcctaaccgattatttggaaccggtggattccctgttattgcaggaggagtatccaaaatttactttgcaggatcttttagaggaggaaaaaacaatattgatataaaagagaacggaattaaaatactacaagacggaccaattacaaagtttgttcaagatgtttataaaatttcgtttagttcctatcaagcatctaaatatggacaagagattatatatgttacagaaagagcagtattcaagctcaatggaactgaattagttttggtggagactgcaccgggtattgacattgacaaagatattttaaaaaaaatggattttaaaccacaaatggctccagaactaaaagaaatggataaaagacttttcaataattcagcaatgaacataaaaaaagatttagaaattttgtaaaaatatgtaagattcttaaaaaccagagtgattattatttatatcaaggcacgattaaaactggacaggtagagatttcagcaatatttctagtaacgctaccaagtgctttattttttgagatccctcctaaaccgacacttcctagaacaataagctctaccttttggtcctttacaaatctgataatactgtatgcaacataacgattggaatggcttcctttgagaattttcgtacttatacgcactccaaatttctcatactttgttttgagctcttcaagattcttaatccattctgattctattactgtattaatttgcttagtatattgatccaatgactcacttttaacatctttagttggtttgctcggggtcgtgattccagctgatgtatgtatagttggtaacacattcagaattattaactcatgattatttttaacgttattcttagatgtatttttactcacatcaaatccgctcaataggtttatcgaataatctaatgctttgagtgaatgttcagaaccgtcaaccaatgctaagagtctcatatattatgaattaatatgcatgtttatatccttgttcttagaagcttgcttcgatactagctatccagatgatattggattaagaatatcttaactcgtggtgaatttagtatgcacttgtttcgatggtcgttaaccctttaatagaaattttattatcgaaaattattctgaaagtaacataatgaaaatttttgtatgcacaatccaaattatgttatatataacctagagaagatatatgcataatcttgaagtggacgatagaagattttgtttatggtgcaacggatggagctgttaccacatttgcaatagttgcaggtgtagtgggagcatcattgtctccttccattgttataattttaggatttgcaaacctttttgctgatgggtttgcaatggcagtgggtaattatttatccacaagatcaagaatagagtatatagaaagagagcgaaatagacaaaataaagaagttcaagaccaacccgaatacaaaatatctgaaataaaaaatatttatacagaaaagggttttaaagatgaattattagaaaacctgaccaagattatagtttctaatagaaagatttgggtggatgttctgatgaaagagaaaatcgggatgtcgaatgtaggcgacgagaatccaatattcaaagcaattacgacatttattgctttcaatatggttggtgtaatcccgcttcttccctttatctttctctttgtcataaacaaccctgcaggttttaccaccaatgatacttttatttattcgattatttttacagcattagcttttttttgtattggctttatcacgggaagagttgttaacaaatcggctgtaaggtcgggctttattacattagtaataggtggtatagccgcactcgtttcttatatggtaggaaccttgttaagcttgtatatataataaacagcaaatatttgtacaaaaatagcaattaagatacattcaagtggtttctcatcgaataaacaggataacacgcttatttcaggtaattatttttatctttttatttgtctatcgctcaaaaacaatcagtaacttttgtttgttaagtaaaaagggatctacgaaccgactggtagatttttcagtatataattatcctcttctttaatgtactactaatacaggacgatttgatatttctatcaggtttcttgatacactaccaagggtctttatttttgaaatacctcctaatccaacattccctacaactataagatctatttgttcttctgttgagaattttatgatgctctcagcaattgccctaccagaatgactgcctttaagcaccgtagttcttattgaaatatctgattctgattctgcatatctagccttgatctttgataatttatttatccattcagtctccatcatctgattcatttcttcgatgaattgagacaaagaaacaacctgattagttttaatagatttcataggtttttcaaatactagcggcatatgaaaatgaggaagtacgtttatcagtatcagttcaccactacgcttattttttgattgatcggcattaggatttgtaagtttgagtagataaattgcatattccaaagcctttaaggaaggatccgatccatcgataggaactaagactttcatcaagtcaaattacctatcatatggtatatccttgttgatagatattgatgtttagtctataatctccaattagttgcgtcaaattaattggctcaataaccatctcatatgataaatatttgattcagggaattaatacccctcttccaattatctggccctctttcaataattctatcgcttcattaacatcatccagtttaaatttggttatattattcataattctaccctcagttaataattcgattacctctcttagttcattataattgccccacaaggatccagatattttaaattcatttaatacagtcattgctattggaattttagctgctgttccaaacagacccactattactaccgaacctccttttgctaatacactgatagagtcataaaacgtcttgtcggtccctacgcaatcaatgatgacgtctagcatcttgcttcttgtttcggccttaattctgtcaaccaaattatcagtggaatgtagattgactaaatgatccgcgccgcatttgcttgctaattctaacttactgtcagatctatccatggcaaatactttagacccacctcccaagatttttgcatattgtacggcatatgagcctaaaccacctattccaactatcccaatgttttttcctggtccaagcatgttcttcacctttttgattgctctgtagggtgtcagacctgcatcagtcaatggtgctaaattctcaggtttagttcccgaagcacgaacattcactaaaaatctgtatgaaggaactaggacatattcagaaaatcccccgtcaaaagacgataacccgggccatttagcaaaagcacaaagttgttcatctcctgacttacaatgtatacaccaaccacaaccccagccgccaaaaactgcaactaagtcaccaggtttcatgatattttccggtactgatttaccaacatcttcaatccatcccgctatctcgtgtcctggtgtctttggtagatttaatgggataatatctttccattcgccactaataagatgaaggtcgctatgacataatcctgaagctcctacctttacgagcacttcctcgtcacctcttatgacgggtttggaaatattatccaattctaaatgtttcttatactcgtgaattctagctgatctaatatatccatccattcatatccttttatattcagtatagaaaaatcttgttaaaataaaagtcagtattatcaagttgactcgttgctaacgaacccattatgatggtgtcaaataataattaaataagtcaagttaggccagcaattttatatagaccaatcttttcaggattgtatgagtctcgactctatcggaatcacaaatttaatgaatagaaatattatagttgctgaacagaatatgaatttaatcggcgtatcgagaataatgtctaataacaatattggctgtgtggtcattgtagacaatctagaaacccgaaagcctctaggaattattaccgaaagagatatcattagaacaattggtatgttacaaccacatcagatggtagtccctgtaagagaacatatgagccatcccttaattacgctttcatcgaaggcgaccgtttcagatgctatgaaattgatgtatgaaagaaaaataaggagagttatcattttagagaaggataaattggccggaattttaactgataaagatatctttagagctttagttgaaaacaaagacttgctctctactgtcatagcaagcaaccttccaatcccagagaagcaaatgaaagatgaaatttcacatttttggttttttaatactttcattgaataaatagtgattaattgaagagaattaatgaaataactctattgaaatgatttataaaaagtcaacccctataattcattaatctttaaatggttttcaatgcaatgtaatttaggtaatgaatcctttttttacatactttgatacactaacaaacgcctttgatgcatatacatcaggtaccaaaatactgtcaaaatataatcaagcatacatcgagagttatttcaatgttttagcagattaccagaaacaggctaccgaatacaaaaattttagagtttttaataatctaagatatttgttaccaacagaagaatcatactgtgaatggttgaaaaacaccgatacaaagttaaatgatttgttaaaatcagaagaattttcatcttcattatcaaagtatgtaaactcccatctggaattacatcggttatggaaagctcagggatatcctatccagcagtttgaagatatttatgaatccattacaaacaattggaactcatattatactagtagaaaagaaaaggcaatctcagagtttaaaatattatataaaaaagacaatgtaagactaatccgctttataaccgatgataagtctactgctaacaatggcaaaaatccgcttttaataatttatgctccaataaatcaatttcacattatggatattaatcctaatagaagtgttgctaaatcgcttttatccaaaggaatagacgtctacctgcttgattggggatatcccacctcaatatatgataggctttcattatatgattacgtaacgtatgtaagagacgcggtacaattcattcaaaaacaatcctctacattcatctctgtagatatgcaagaagaaataaaggacaagaatacggatcaaatgaacttagaaataaaaaatacgaaaaaaaatgatttgatcgataagtctggttcagatactagcagtaacagtaacagagttaatcaaaattctacctatcctgagcagaaaatatcaatcctgggatattgttggggaggaatcatatcattatgttatgcttctttgtataataataatataagaaatttaactcttctagcggtccctgttgattcgagcaaagatcaaactattctctcaacatgggccaagaaccttaatgcggacaaaataattgatgagtttggtgatctaaatgggcaagttctagatataggattcatgatgcgtaatcctatgagatatacgatagataaatatcttacaatggctaaaaaatacaacgataaagaattcatggatatattcagatccgttgaagaatggctttataacacgccaaacattccaggaaaactctttaaggatatcataaatgagtgctacaagaataactcacttgtgaaaaataacatgcgagtaaataatgaaattattaacctcaagaaaataaatgtcccaatccaaacaattgtagctgaaaatgatgatcttgtgtctccagagtcaacaatggaagtcgagaattgtgtctccagtaacacaaaaaaaatgattaaatttaagggtggtcatgttggattatgtgtaagcggatctgctcatagtcaattgtggccagaggttgccgattggattttaataaactgatcatatcgattaaccgaagccgatatattaattaagaacatcaatccgacacttagtaaagttagtatagtatgcccataaatgtatccattatcataagcataagtgataggaacaacatagactttgttaccatcgaaacatcctactctgcctattaattctgactttaaaagatcatcaatttgactcttatccaaatcgccccacatgattagagtattacatattctatgattaaaaacatatactaataatagattttgacagctctgcgaagttaagatatcatgtgccgctcacggtgtcatttatataagtaactttctttatcattttctcagataatcccttccttcttttgtcaacaaaagtcatctaaccaattacaattatagtttcttattaaccattcaagaaaatttaagcgccccgtgtccttactatgtttatcaacactaggcaaatttcatggctggcgtatagtttagtcaatctgatgtattcatgacatctcgttggttggaccttttacttaaggtaggcatggaacttgtcgtctttgtatttcgatatctatttcagtagatactgtaatccaaagttaaaacagtcagattgttcacatggtaaagtgtatcatccaacagtggggaataataaagtacttttttacaaactgaccagatatataatacgtcattagcatgaaaaagtattgttgtagagaattacacgaattggaggatgattcttggcagagaggatttgggcttaatgtagtggaaaaaaacaaagttgagatattttgtatggatgaagcaggttacccaaaacgcattgatgattataccttcaatttctgtcccttctgtggtaatagactacttacttaagcatgttttttacattctcaatttattatgatttattcaattattgcaagtcgtcatctgaggaaaataagttctttgtggcaatagaatgctaatgatcattaatatttattatgatcaattataattatatagattgtaatttgatcatctatgaataatattattggtggagtaattgaataattttgtatctaactcaagtttgtaacacatcttgtaaatcatcatcattgtcgtaatagcgtggcaaaaaagttgatttacaagacaataagccaatcattcttgatcatttgtgttttcaaatatcggtcttgctatattgtactttaatacgaatacaggacaattgctgttcaaagaatcaaatcagatggatttgtagaggatccctgagtgcagtcatctctgaacataaacaaattaattctaaatatagatgcaaaattatcaagatagggatttagtaaagcccatcattattatcattactctttgtataaaagtccattttatcttctaatcccttatgttcattgtcattattgtgaagtgacgtaggatcttgtctattgcgtttacgaactcctataacaggtccattacaataatcacatatgtctaaaattaaatcatagtaaacctccttctgtttatcaagtgtaactgtctttaagggtacaactacaattggcatattacaaatatgacacttcatacttactgaatagatatcaatgctaataaactactatgtgaaattaaaaccttttattctttctcttttcatatggtggctaaaaatagacttcatattatgcttgaatctcgttgtatgatcaatttcgtagcaacattaatccaattatatattctaccatgaaataaaggtgatactacgattatctgaaatactgtaacatggacaaatcattacttacttagggaatttataaagaggtaaataaaaatacattttacaaaatacaaagtaaaaagagatcttagatgtgatattgttgaaccactactgatgatatgcgctactggtgctactttaagcccaatagtacctcatttggggcacaaaatatccagatttctgttaaaatattatttgttttgtctgatagagttaggtagtatatcatacagtaaaataaaaaataaatatattacagagcaaatggtggtttgaataagtatcgctgagctgatatatttcgaattaaacaaattataagcaattaattattttgatcggctttgtaattttaagctctgaagtttttgttataatgacacgcatacgccttaatccattgtttgatatggtcgagattgtagttccgttttcgacatgaaaaattgtcttcaaaacttttcgtcttatcccgtgtgtactacatggttcattcgataacatttttctctagacgactgatcaatgtctgtattattcttaaatatattctcattcattctggtttgatttgattcttgtgctaatactactataggatataaagctgcatcaagatacagaaaacaaatcaccatagcaaaaacacaaatggaaaatatgataaatgacgaggtgacaaaaagctcctttgacttttttatagtgaagcctatttttttatttaggtgaaaacaaaggtttggattacttgataatgtcagttaatactttctaggtgaccctatgcttattgatctgatcattacacgctgatccaacagaactactaacctgtcgccattatataattttgtctactgctgttatgcagtgtataacaaaaatatatataaagaacaaggcattgcaatatatatgattgtacagtttagaggcgacctaattttctattgtaatattcctgaagtgatagacaaaattaggtttgtgtatgtcaaaatagcatatgatgcaattgaaatgtaaattgaaactaaagtgacaaacttgacttgaaatggcacctaatctcatcctctcctggagtcttgaacgtcgcaatataagccgatttcttaatttgtaaatcttatcaaaatgacttccattttagttaccaacccgaatggaagagtaggaaaaaaagttgttaaaattctatctttgtatggtaaaaaattctatatatccctcagatcaactaattgttttttcccttcagcaagtcaaaaagttgagactttcactaatcaaggtttaatcaattttgttgacatggattacaataatctggaatccattacccaacataaactggagggtatcgaaaaaattttcttgatattaccatattttaacgccctagatgcaactaaaaaaattgtagcagaagcacaaaaaacaaagtcagtaaaacacattttaaaattatcagatatgggaatagaattaaatccgtctacctatcgaggaatgatacacaaaaaagttgaaaagataatcaaagactctggttttcactatacatttttgcgatctaattattttatgcagaatttcatagaattaccttataaatatacggtaaatgaaaaaattttttatcttcctttagaaaatgcaagagccagctttgtggacctgagggatgtagcggaggttgcggctacaatccttcatgataaatctaacaaacactatgggatagtttataacataacgggtggacaacggttaaattgtagcgaagtatctgatattctcaaaacaatactgagcgaaccaataaagtatgtcaatatttcagaacaaacagcaaaggcagaactaataaaggcggggttacaattagaattggcagcttatttacttgatttttacaaagttataagagagggacgaatgagacagatctcaaaagtagtcgaatcgattttaggtcgaaaaccaatctcatttgagatcttcgtgcgagatcatgtagagttattcaagaatgaaattgaactgaaagccaatagtcaataattaatttttcatgtatttcgatggcttagctattcctcttttaacatgaggtttgaatcatccgaccatttctaatcttcgtatctcttcggatcataggtaatttttctgccctactagacgcatttttagatttgacatctaaaagaaatatatctatttcataatttctgaagatataaatttcataaaggataagaataagcgaagaaatattgaacccataaagaaattatttaaagatttgccctatattgtattcttaaatgaaaacaaagaagaataaaaaaccgaagtaaatggtaatgagttagtttgcttaggagttttttcttagaaaaaatacaataagtttcaattttttagttccatttggacgcatattgcacaattctaaatatgttcaaaacgggtatggtatctgatttattgaggcttacggtattaataatactaggacctttcctgataagcatcatctatggatgatgaattgtcggattagcataattagactttattatttaatattttattgccgattgagtaggaggatagttgaaaattcaaatctgagttgcacctctaaccatcctaagatatccacaaattcctatttcaaagaatttgaaaatactatgaaaatatgacaataaatcaaaattacttagagatgcgacaccataagatgttggtgttgatatcttaacttcgcagagctgtcaaaatctattattagtatatgtttttaatcatagaatatgtaatactctaatcatgtggggcgatttggataagagtcaaattgatgatcttttaaagtcagaattaataggcagagtaggatgtttcgatggtaacaaagtctatgttgttcctatcacttatgcttatgataatggatacatttatgggcatacaaaggatggattgaaaattcaaatgatacgaaataatccaaatgtctgttttgaaattgattggatgaaagacatgaataattggaaaagtgtgattgcgtatggaacatttgaggaactgaaaggggatgaagctaataaaggattggaaattctgatgaaatcaattatgtctaatttagatagaaaatcctctccgactgaaacctatggtcctgataatctaggtatcaaaaattttgcttttcagcactcatttttatcgccatttttacatagtaataataaggaaatttttgatattgtggtgtatcgaattaaagtaaatgaggctacaggaaaatatggggataataaagaacctatttcagacaattagcacaggatttttattagttccataatttagtgtacggagtagttggtaacgctatagatttgaattgtaatcgatttgctttgatttcatcatatccaacctcgcgcccgctgtttttttcatgataatcatttattgcctgtcgatacttctttagcaatagcccatagagctcatttcttattactaaatgtgaagtatatacaacctttgacatatgaagattttccattaacgataaatagaacagcagacgttccgagggaataagataattatatctttcaattgaaagtgttacaattctaatatctcgcaaagtgttatcaaatctttctgctatactcttttctagatcttttattttttcaagagtttgagaactgagcattatttcctccaattgattcttttttataatcaaaaaatatcctttaaaaatgtctattttttgaatcaagctttcaagcgacatagtattttctatgagttgcatttcattttttattatcatgtcatataaattttcaaattctctttctgatagtctttgtaagtcatccaaaagtagtataacttgtttggatttttcatttggtggaattatagaattgtcataaattacggataagaaaagtcctatcccaggaatagacgataaggacgttttaactaaattatcaattaatggatccgttttaatagttaataagacagactctattttttctttggcgttttgccaatttctgggcgtatccacaatatcgtgaaaacaacccaatatataattatatactatccgattagatggtaaaagatattaaagattttcgatgacataatctactgctaaacaacactgaacagttgttttttttaccttatgaagtgcaactagactttaattcgtctaaacaaaaaattactaagttaacagatccactatccctcatggatacaaacctcacggggctcacctaataatttattagcaatttattaaaaagtaaactctcgtacctttgaaaaaatattaaattgagatatcttatatcttctgtattttattaagaaaacataaatcatgaaacgacattgctgttctgttggttgattgactttggaataggtattcacaagagtacgaaatgtctgattacaattagcaacccctccaacatcttgctgaatctgtttttcatactaattacggagattatgatcccttgtaatggtagggttgtttcaccaatcccgtagacagtccttgaattaatatatgtaacatacacaggtccattataatagttgtatgtagtttccatcggaacagtaacaactatgacggtatctgttacatcatcatctccatcaatcatagatacgttatctgaaatatctgatatgccgattgaagaaatataggataaggaatggtaacttcagaaacagatcaagtatgatggggtttcagatatggtattacgactggtaaactatcataagataatgaatattggataattacaaaatcaggtgatgttagaagatatgattatcgcgtgctattacctgagatttttcattattattgattaagaaaaatcagaaatcccaataaacgccatcagattatagctctaatcataaaatcaaataacaactaatttgttgaattatattcttgtaaagttaggatgaccgaattataaaacagacataacttttttgtttttatttgaaattcacatatgaagaaactttatagtatattagggtcatctaaatattacatttccgatagcaagtactaatcaaatattagtattatttctcccgcttttacaggttgctgtttgttgaacaatatgtctattatctttccatctcttggagatttgatttcattgtgcattttcattgcttcaagaactaaaagagattcacccgttttaacatatgatccaagttgcacataaatatcaattatatatccactcatgggtgcacgcaattcctgaatggtttcttggtcaatatttattttagataacgtgtatgtcatgccatttatgattaagaaagattgttgtttaccctcatttcctattcctgttctttcataaaaatcaagataaaacttctttgaatctataacaaattcattttcttttattttggtcaaatctatagttttttcatttataagaattttatccccctgcatttttacttcataagttgttccgttaacctctaacttcatttgacccacctcatagaattttctaaattataattcccttgtaacttaagaaattcttcatatctgcttaaaatccagggttgtctctgctcattttcttgttttgtttcgtcttctttaaaggactcgcctgatgatcctcgtcttttcaacatattttcaaatactattgctgcaatttccccatccttttctgaatatgattccattttttcaacaaaagcagtatcgtaatttccggatagaaatcgatcatcatttaaagcagataaatgaaaaggtatagttgatggaataccagaaattcttaaagataagagagcatttttcattttttcaattgcctcttttctattttctgccctgactattactttggcaattaacgagtcataaaatggagggatgctatatcctgtatacaatgaactatctatcctaatattttgtgaatcaataggaggggtataattctttaccaaaccaggatatggtgtaaaggcaataggatgttcagcatttattctgcactcaatggcatgtccactggcttttatatcattttgttcaagtgtcatcccacccctacatgatatgttaagttgttgttctactatatcaattccagtaacggcttctgttataggatgttctacttgtatccttgaatttatctccataaaataaaatgaaccattctttaatagaaattcgaccgtcccggcgttatcatatcgaattttttccataatttcaaccgcagtttttaccaaactctccctagaaacgtcatctaatgatggcgagggtgtttcttcgatcaatttttgatgcctcctctgaatagtacattctctttctcctagatggattactctcgaatgatcaccaattatctgtacttctatatgtcttggattttgtacatatttttcaagatatactctacctgaaccaaagcttaataacgcttcccttatagagaactttaataattttgtcaattgttgaggagaatctataatttgaagtcccctcccacctcctcctcttgcagcttttataattaccggatatcctaatttttctgcaaattccaatgcctcatctatatcagatacttctttaccctttatagtagtagcaacgtttgataatatctctttagctagcactttatctcccgaaatttttaatacatcagaagaaggtccaataaagaccaatccttctttgttacacaaattagcaaattctgatttttcagcaagaaaaccatatcctggatgtacgaatgtacaatccatttttcttgctgcatcaattacctttatcatattcaaataactctcattgggtaaatttcccccgatattttctacactgtcacaatgttttatatgcaagctatccttgtcagcatcagaatatattccacatggagaatagcctagtttacgacatgtcttggccactcttatcacaatttctcctctattagctaaaagtattctctccattttgaaactaagtcacaaagtaaaattaatattattctataccaaaaaattttggtattcaccagcatattacataatggcttagttacaaaaccattttgtactaataaattgatcaagcatattaaattatggttttatataggcatgtttccatgctttctttttggtaaatcttctcttttcctattgatggcatttagagcagaaatcagtttctgccgagtctctcttggcattattacattgtcaatataacctttagaagctgcaatatatggatttgaaaattttttttcataatctgatactaactcagatctcctttttcctttattttcagaaatagataattcttttctaaatataatattacatgcactttcagcacccataacagcgatctcagcttttggccaggcgaaattataatctcctcctatatgtttactattcattacatcatatgctccaccataagcctttcttgtgattactgaaagtctaggtacagtagcttccgagaatgcgaataaaagctttgcaccatgtcttattattcccctccattcctgatctgtaccaggaagaaatccaggaacatcaacgaaagttattataggaatgttgaagcagtcacaaaatcttacaaatcttgctgccttgttgcaagaatctatatctaaaactccggctaaaatttccgggttattggcaactataccgacagcgttaccatccaacctagcaaaaccaattatgatatttctagcccagaatttttggacttcgaaaaagtctcctttatcaactacttttctaattacattttccatactatatgacatatatgagtcggaaggaagaattgaatcaaggccttcatccagaagattggaactatccattgatttgacccttggtgatgattccagattgttggacggaataaatgaaagcaattttttcaatatttcaaagcaatcatattcatcatctgccacaaaatgagccacaccacttttttcattatgtatgtatgcaccccctagatctgtagatgtaacattttcattggagacttgtctcacaacatctggaccagtaacaaacatgtatgctgattttgtcattattataaaatcagtcaaagcgggagaataaactgcacctcctgcacaagggcccattatcaaagatatttgaggaattatgccagagactctaacatttctgtggaatatatctgcgtaaccacctaggctttcgaccccttcttggatccttgcacctccagaatcgtttatacctattattggaaccccttgttttaatgcatgatccattaccttacatatctttgatgcaaaactgagaccgagtgaaccccctaagactgtaaagtcatgacaaaatgaatagactaaacgagaatctattcttccataacctgttatgacaccgtcacctagaatttttttattttccattccaaaatcatgacaattgtgaattacaaaaggatctatttcctcaaaactgcctgtatcaaataaggcattgattctttcagtcgctgtcaattgacccttttttctctgttcttctagtttctcttttccaccacctagaagatgagttatcctcttggcttctaaatcagaaaaattcataatccaaattatacaatttaataaaaagagttttcgttatcgttctagtattattctaattgttattgcaaaagcatcatagggagagcaaaatcagatgaaatatgataatttaacaattatttaaaaacaaaggattctgatattgtttacataggctttcttgttgattagtttgagtcttgtattcggattatatatagaatttgaaaccctggcgattccaatttcttgtactatcccacagtattggatatcgactattaggttcaaagctaaaatgctccgtatgatagtaaaaaaataggctggggcatctatttattgcagtaattgtcttcctttcaccagccagtaggattttattgactgagttaacccttctgcaaaacctttccttttgaaagtactaatatccctcaaaatcactatggtcaattaaggttaatttagattcacatccagagtatctggatctagtctagatcctattataaagatcactgcacctattgaaatattcaagaggagtacgagtggaatacaaataatccaaatatttattttgaaattgattgaatgaaagatatgatcaattcgtaaagtgtgattgtttatggcacctcaatgtctttttttcattagcttttatatgaaattaattgtataagtattgaatattttcgtagctttactttggttactagtttaatttcgtatatgggaagcaaatcaagttcttggaagcaataaccaaggttgccgtgttgtttgaagccattttggattttaaatattatgtttatttattaaatcattatactaaaaattcagatcgaagcaatgataaagaagatcttaataccagaccatggtacagaggtttcaaatatggtacttgtaacagcctatgtaatcgctggaccatgtaatgctcaaatcatatcgattcatgttattgaggttagtgaagatccatactttgatatttagaaacaatacagaatgattgaaaaaacaaaattgataacaacagtggaaaatgtatgtcctaaaagggcacaaaaacacattgagaggttaagtgctcaaatcatagtatctgaaaacatgtgctcaactggaatagctacggtaaaaattcgagtgcaaattacaagaaagtagacaggattgtaatgagtagcaataacaggttaagaggtatttcaaaattaaaagcattggacagtgttactagaaaagtttccgaaatggcgaattgcccagtacttatagttcataaaatgatttgtcttagtcaaacaagtatacatcataattttgaaatattggatttatagcagaatgtttttggaccactacaaaatttagggaatcttgattctaaaaatattgacctattatagtcatatagtaagaaacatctgagtgagaaggaccctatatcgtgttaagtccaatgaaatagatagacgacctttcctaaccttcatagttagattttttaagacagatttaaaaaaacaacttttgaatttattaacaaatctccacattgaaatagcaatataacaatgacatgtcttgcttgaaaaatgaccctctattcaagaatccataatctctaagacaaggataaccactattcatcacatggtcccgattcttgtttaatttgacactttgttcaaaaatataatcatctaaattgttaattaagtagcagtcatcacctccatcataccccgaagagtaagtcatttaacttcaaccttctggctgggatgatttggaatcctgtgcttataagaaataaatttgctttttgaatctattcctatcattttgtttttttacttttctctatcaatttctttcatgagatagataggttatattaaattatgaaaatactctgatctgataagaattacactcaaagttaataaatgatagataatgaatagaaaaagaatgacaaaatccgactataattgaattttcaataaaagagtactatcaataattccatcataaatcattccaatcaaaatgacgatttagatgaaaattgtattgacgagtacgcaacagctattgaacagatacctattcccctgagctattagaattgcaaacctaaacagagaatgaagaactcagaaaatagagatttgaaattatatgatgtgattgctgagaagagtggcaaaacaataaaaaaatgatcatcactttatttcttgctcttagatgccacacaatcacccgtgataacccgatctatgagtcaaaacccaacacataatactagagtcacggtcctacaaaaaacatgtcacatttccgtaatatggtttaaaatgggtccgataaaggtatcttgaattcattaattattccatgtacttttatattattttacatattcttgataataagtggaatggagagtttataaaatttacaagttcctcaaaaatgtttatttgaaatattataataccctttccttaaataagaacttaataatttcagggattttgggcttcctagttagtttagtcgttgcacaaatttcagccgaatattccgtcgatattgtgctaaactcagcattgacagtaataatgggttatctaacatacaagacaatttttgcggttctctttcaccttgataacaaacaaagatatacagaaagattaactggaaaattaaattttcaaaaattaaagcagattctgatcaaaatgctattcgctagttctgtgtttgatatcgtaaataacttgacgagtttcattctcatggttcagctcctagaattagaatattcaccagtagaatcgacaaccatctcttctataattgcttcagtattgtcatatgccgtcataaatttcattattagatatcttcatgtttttggctcagagaaacgataggtttttggcattaaatttcaagataatgattgaaatgtactcgcgatagttaagaggaaactaacttgcgtaccagttcataattttctgtggtttaactctatggctttataccaatttaaagaaaaagagagaggatgccgccttacactatcttctcttatacaaccgtatgcaatacaaactcttccactatggggttttgaggaggcacagaattaatggaggttacttcagctcttattgtgtagtttttattgccgtctaagaatggtacatcgatatgatatgctccagtgctgctaaaatccgggccatatacgtttgtttcgttaccattgttctttattaactccaaaggtaatgattcaccagaagtaacaaaggtttctgtaaatagggtattattgttgttctctaataatgtaatattgaatactataggcgtagtcctatcgagtgtcactgtcaacggtttgaagtcaagaagggctctgtagtcttttgtaaggttaaataccgaaccaactccggaagacatttggaggttttgacctttttcaaaagaatcacttactgatactattgcttgtctccagggatgaataatgcaatgataaacataatttccggacttgtcaaaggtgtattgaaagaatgcatttgcagttgctggcattattcctgaattaaaaacatcaccagtatgagaagaatttggcacaccgctagtcactgtatggggttgaccaaaatcattgttaaaccatactacagttgttccaacaggaacattaattgcgggtgggtagtaatggtatggactgtctcgctgggcagctccgggaactatgctcacagcgtacgtacctggagtattttgtagggtagccatacttcccatttggccataagaattaggtattattgtcactgttgaacttgatgatatcgaagtaataataatgagtgcagacgcaactaatattgtgccaatgaatcgaatttttaaatatttattaaaattcattgatttctgttgagttttgatatttataacctttttaataattcatttacccagcaaggttaaatcattgtaaattgtcacgcattatgaaatttataatctttccatgattaggatatacagaatacgattagttttcttcaatagtgaatgctaaataaaaaagaatagattggttatttccaaaccgaagatgtttaaatgactatttggtaaactattcatcctatattcattatattttaaaagactaaggaataacatttattgttcctaccatcattggatgcaatctacaaaagtacgaaaattcacctgcattaatgaatttgtgtgaaaaagttttagatggtgaaataagagatgttaacccagagtcaaatatttgacctacagttggagtgtttggtattccagatgtaactgtgtgtatagtattatcgttattagtccatgttattgtgtctcctacgttgattgtaattggatttggtacatatgatttatcgccaagggtagttgccccttttactattgaaacttggattgaattgttatcattggatgaagatatgttagataaagatgattcttgttcccgttcctgcgtggtaggttttttcatttctttttctttcgtttcattatgattattgccatgcatactgggaggagatgactcgaccatttctgtagaagttatatttccatttggatcagctttttgtaaggtctttgtcaagttcatctgccagtcattcatgtttaccgatttagtaatagctatgctctttccatcaatagcgttggcaggagggtcagtcacattaaagtatcccatcgctccgcgctcttccggtattccatggaaatgaaatgtgaatttaccaggccacggccattttgcttctaaaatggctgtatttcctgaggctaattcccaagattgaacctttaggggtgaattttctagaatacctgaaggccatgctttaaacagagttccgtgaatatgcataccataggctggagacattcccatattagcaaggtaaattcgtactgtctcattagtcattgctggaagaggattcaattcatattgttctgcataaccattgtaaaagtagtactcgggtaacggaataagttgattttgagtatcatattctcctgcaacaaaaacatattctctagcaggtggtaatggatcctttgggtaaactatgaatgcaccatacaaacccattctcacatgttgcattactggaggaacatggcagtggtatgctagggcaccagccggttgcgcaataaaatcataagtgtatgttccatttgttcctattatttcaaaaacaccatcttgttcactaggatggtctccatgtaaatgaactgtatgtggtaatggcgtcttattaataaaatgaactattactctatctccctctgtagctgttaaagtagggcccggaatagtgccattgtaagtccatgcatccacacggagtcccggcgctatttctaaggtagtattttctgcaattagggtatactcgtggatttttggcggtgaaggttgttgttgtaattctttttgggtctgattcactgaataagaaatgctatctgtcatattgtcattctctataataggtttagatgatgatgtgtctggtgaaatagattgagactgggcttgggctaatgcaatattaccgttattagtaataaaaaagatattagtagtagtaccagctattagtaagattgagactataaaagaaattgttttccttgatttccatctatggtcttttcttaaagacattttatttgtaatctaaactactagatcccgtgtttatgtcttttgtattatgatctcgcgggcgtaatttacattatatttattaaaaaaattggatttctaaaagatatttaattataattttgtatattatattgttcatcacatgtcatgttatcatccactaagcttgtgcataatttctccaacccgaagtaatagtattgctttctgccaggttatcaacttcccatactccctttatattatattgatcaacctaattgcaatgcaatgcaatgtgatacatgcataacaataatataaaggattatcgttgatacatctgatcaaaattgtctccaacttttatagcacttatgctcattccgataggagtgttagcggtaatgttcatttcagggtttcaaatattccaagtattatctcccggtacagaagaagaagttacggtattactaaaacaaaatggagtgtgtatagtagaggcatctgataaagtcccacggcaaataaacaattgtcaatatgaagcaggagatcagattgttattacatttaagaatgagcaacctgcaatagaatctcatagaccggtttgagtttttgaaataattatcaaacccattttacgctaggagtattttttcactatctaacgtttttggtagacctagatttccattcctttgaatgatcatcaaataacatccatagatatttttgctccttgtagaaaataaaaattttcatatacacaattactatcattctcttccgattagagagaaccaggtatttagatagactctcaaaatcatataataaaacactatttagatacaatatcgcctttattctactatgcaagtttgattagcgaaataagactttataggtcttatgtttaattatatatgttattcaattaaaataattaggaatgcctcatgttatataagatagtctattttcttgatgatggtattttaaaagtcaaaattaaagaatgatcttttagcaatgatttttcaggtttcatgttcaaatctgcaaatagcatagaaattagagtacccatatataaagaacatttttggcttaaattatgctgtattcttagttcgacagtattttcagatttgattactgtgtttgtaaatttagaggcagaaagccaaagttttattacatctataatagtatcaacatcattttttccgtgaataaatgaaatagcatcccgcataccagtataacatacggttctggccgcttttactaaatcttcttctgaaatattttcaaaaatacgttgtacaaatggtttctgtaaaaagacaaatcccacatcgcttacaaactgatcccaactaacatatttttttaatacatgatttattatacttgaaatagttttatcctcttgaattgcctgattattgatcttttcgtatacatcagtaggaatgcgtatagctgtattaatagtattaggagtagatgagttctgattcgaattgagttttgtcatataatatagtttttgtttgacgttattattcattgtgatgcattagattactgatggaataatcgtaaaaccacaaatcataaaccagtataatttattttagtaaaataaaaaagttattgttcttagcgtcataatatagtttgattgaaaactttcttttaaagcggattctggtatttgtttatttataaaaactagttccacgacaatagtaatttttgccattcccttgaaagaaattgggatatgttataagattatacatgaagatcatatttgatttatcaataattggtggaagaatgagtgtctacaagattctgttgaccccagcatacaaaacatttttgttaatgcaaatactttcctgtccaacatacttgaggcattttgtaagtaaacctgaaagtatgcagcacgcctatttattgtattgatagcttaaaaatataagcccgcatatttaattatcccagttattcctctcctcttctcctccagcagggctatattgactgagttaacccttctgcaaaacctttccttttgaaagtaataatagtctcaaactcactatggtcaattaaggttaatttagattcacatcccgagtatctggattcaatctagaacctatcataaggattattgcacctattgaaatattcaaggcaagtaccaatggaataaggtttggtgaaacagattttttgttagacaaaggacttcgcaataatcggagaccatgaaccaattatcaagcattcattgtaaacaagacccgaggtagtatttcttatttctgtcggaaatctttctgataagaacacaggcataggaccaaatgctgttacggacaagaatatcaatgtgaatgcaaaaaatatttttttgtgggatatttgtagaaataaacaaacctcaaagtaatggtacggatagtattatagatgcaatcgcaaaattgttattattttcatccttcctataagttgactaacgggtcctgtaaatatggtgcctaatagtgctgcaaccgttactcaatcattattattgcgacatcatttttgttaatttccacagtattctaaaaatacaggcatgaaacctatggatgtataataagaacacatgagacaggtcttaattattaatgcgaaaaaaatccattttcgttggaccacatcagataaaatatttttcaatggtgttttgtgtatctcctttctttgttccttggattctaactatacttttgattcaactatatttaatctatttattaatgccgctaatccaagaattaatcatgtgaaaaacagaatttgccatcctatttcaacaaatttgtcgtttggaaagaaattaagcactaaaaggtacatgacggaggcaagcacaaatccaaatgaatatccactttgaacaaagcctgaaagcaatcctcacgacttgtttggtaacatttccatacaattgaattagtctaatgaattgattactatcagtccttctatcctaagacttgcagttggaaatgattcaaaaaatactcaaagcttaaaaaatatctgataattagtgaatttcatacattgttaaaagttgatcaattaaaatagatgaaagcaatcttactaaaaaagatgctaaatccgctgcatagactacaccgcctagcctcagatatcatggttccagatttaattttcaacggcaataatagacacgctgataacgatggtctgtatatatgtttgtcattgacagaaagctgagcataagcaaagcgctgataccaaatgaaacaaacgaaagtttcaattgcattgtggcttttgaagcacatgctaactatatgtgagtgattaatcttttcactttagaatgcttcatacattattataaggtatcttgcaatattcttttttatccgctataacaaatgaaaaaataataacttaacaatcctccaatgaattttatatgatcttattcattgtccaataacgaatcatgaaacatgttattccactctttgcaataattcaaaagctgctgattcttctccattacgtggggccgattatttggaatataagataatatttgaaacaaatgataacaaaaaacattccatcaaaactacaaatttgacaattccacccaatattggtcctctaatcaaatattttagaggaaaagctgtaaaaaaaagtgtgagacaataagataaaaggttgggccttgattccacgatgttgttgtagttggtttcagacaagagatataacactactagctaattcttctttttcacttatttgtggggtccaactaccaatagctgtgtatactttgtactttcttatccattcataaaaatagaactataagcgcccataatagcctacaaaaaggcttgggagaaaaaagcagctaaattaaacgaatttcttgttaatgttatatgagccatatctcttcttctttttctcttttaggccgctaaatactatctattgcaaaataaaagaagatgagtaataatgcaactgccttctagcacctgtcactaacaaccaaagttaccggtatccacccaatcggttttgattattatccaccaatctactgcaagatcccgtagcacatacttgtagggcaaatagccatagccttgattgccccagtttgtaccccaagaattacgtataagaatagctcctgtagtctcttcaccgcaaccattgttttctatttttaggtcatcatcgtatcctaccgccattactgcatgtcctccaagaactctttctgtgatgcagggaaatggaatattgccttttgctaaagaattagcagcagaagcctgctcaactgattcatgaacagtgaaaccaaacatagaaggaattccttttgacagattgtcctttattgtatatagaagattttccttggtgatatttggtatgtcaaggcggacataattgatcgcctgatagtttctagcaaaagcatagcaaaatgcaggtggttctctatcaaatttagatatatcgtatttccaatactcctctggcgggacgccaaataatctcatagcccccattgtacttcttaagtatgctcctgtgtctcctcgaagccgcaaaagattcctcgttactttataaagaaataaactagaagcatctatgtgctttccaaatgcctttctttcaaaatactctaccattcctactcccgcttgtgcagtacatgaacccaggatcccttgatcctcaacttgagaacaatactgtcttatttggtctactcttgtagggagagaaagctttttgctctttgctgttgattgggtagtatctacgcctacctctgaaaatagtggcttgacctcttcagcacttaacgtataatctcttatgctgggataatcaggaatccatcctgttcccttcccattaatagtagtctgactcatttttctcatttttgtgccagtgatgttttatataagtaatttgttgaagtatgtgcgtcagtacttttttgtttacacaattggtagacataacagagctaatgccaatatctgccaatgtattgagctagcatattttttagtaaatagcatctacaaaacaacctatgcaaggtttctaaaacaggagattgggatccacctgaagcctatttcataacaaaacagtttgacacatgtagggggcccttctcctcaactattttcaaaaaaccggtgacagcccaaggaattagaggctatattgttaatcgattaaagaaaatgaatttgagaagcccttggaaatcgtctcaaaactcttgaatacattgtatctcataaaaatgaattatatccatgtcattctttccgaatttttgcaatcactcaacttcagagggctaaagtagacaagactatcaaaaaaatgattgtcggacacaaaactgacttatactcggtatattacaaagcatataaagatgaaaggttactagtatatattacagatataaaactattgagtattagtaaggaaactaagttaaagagtatgattgaagaattagaagaaaagaataacaacgaaaattcagttgaccggagattaatagcaaaagataaggaagtcgaaggattaaatttatttctttgcaaaattttgtcatcaacaatcatgatatgagatcagttttgtctcattattcatatggtttcatagtatatctctgagcttattgctactgaatgtaagcctaataattttacatatacaaaatcaattacagaagtatgattttatgaatcctgatattgttccttggaacatgcagtaacagtactaatattaatgcacatttttcagataatttattgttatacacagatgtcgaagttgtttagttttctttgatgtcaatagcctcagaagaaaatttagtttaaagctatagatgtctccatataattttgactttttatcactgttatgatattcttacccactagtttatactttacttggtagtcatatcatttatttttaatcatctaatgttgaactttaatcacttatattttactagggtgatgatggacctgattttatcgatactgcatctggaaacgacaacgtaacatgcccccgatacattggctggcatggaaggaaatgactgaatatagggtggagataaccgggatattatatatatcaaggcgggaggggatgatctatatgactacaatggaaataatattattcacgattccggcggttgcgagtctgactgctcacgtgacgagacatactgtgatggaggaaaggatgataaagtacggctaaacgacactaacaaagttgtttccaaggctgcaagattgagaataatattaggttacgcttacctagttttggtatctggcgttcaccatttggaagaaaaaagcaatgaatcaacgagaagaaaaaagagaatcaaaagaagacagtaaatgactaaagtacatacgaatatttttactattaagcaaaaccgcagataaaattaaattatgtagggcaatagtgaaaggccctttagccttagatacgtactgacttatttagagcttcagctgtaagctttccgactttaccatcagcttgaagtttattaccatgtatgtcattatgtgtcgcttgaaattctaaaactgcagtatgtgttttattaccatatttcccatctatcccatcatgattagggccagaatttccaagctcatgtccaagtttttttagaatgatttgaagatttttaaccaacatagatctaggatcatttaaaactaatggaccatttccaccctcagaacgattcctcatctcatctggaggtaagggagtaataacagcggtctgtctcgataacttatcatatgctgcttttgcctgaattatacccgcacccaaaaaaatcttcaaatcagatccacctttatttttagcagtagtcatcagaacattcttgacttcatcctgagtaactgattgggatttctgtttcagtaatgcaataacacctgcagcaattggagttgccgcggaggttccactatcactattgaaaaaacctgtgaaatgggtgatagaagcaaagtctggtttatttggatccagcgcagctggtccacaactgctgtaaccaacatattgttcattcttgttaaccgccgcgacagtaatcacttgtttatgtccgtttgcaccccaaatgctccttccttgaccagtatcagatccgcatctgtcatctgcacacggattacccccacaatttccagcagcaaaaagaacaattattccttcattaatagcttctatcactttcctagttagaaaatgatcagggtttatagtatagtttggatcccattctctctggtaatagccccaactattggtaatgatgtgtggtgttccatctaccttatgtctatttatggcccaatcgaaatttctatatgcacttgttaatgtgtctccggttatcctaaggtcataaagctttgcgtcaggagcaattcccagaacatcagtcgcgcacatattcccgtgccagtcccaatccacaccagtagtaccccaatcagacacggatccatcgattacattcggtataagctttccgggccaacttgtatgaatcgtatcttgggatcttatagatttaccttccgcagtagtccccccatcatgaatggcaacgacaatattttgtcctttaattccatctgcatgaattgcatgtataccaagatagttcgctacgtcgttaatagttcccttcggagtgccgggatcacaatcacatggcggtataggacaagaacccctagcaactgaactcatttgaatgaaatggtcatctttattcttaaagggcctgattccagcagtgtcctcccaaaccttgaccacattgggttgagcttcaagatcctttatcttatttctatcgatctttcccctcacaattacaacatccatcccccttgaatctaagctacgggccagttctggaattggagttataggaatagctccatattcagtatctaattcaaagccttgttgcattaggtctcttgttagtgtcagatcacgcgagtccgtagttttcggtttagtaaattcgacagctacttggacacgattttcttcatctattattaatttctttttatcagagttatctgagttattcattatatgattcttagtgcagaactattttaaaaatatatattgtttttgtgtatcttattaagatatttccactattattcaagaatactcttaaacatcacaatataatatttagagatcaaatattctcacagtgttaatagtgggcacctattgcaatattatagcacatactaaagttagataaaatttactgtcttgttctacttttcaagtggcagaggcaatttattcaaataatatatgggtatttccggaagacacacaaagcaacagatgaaatgaagcaaagatatctaactcaaacatctaaaattttctttgttacacaactctgattctttactaataaagctcaaaatttagaaaaaaagtctcctcaagtactacttgaataaggtaaatgataccttgtttaagaaatatcttttttactgtgttgaagatatacaattctattctataattgggaccggaaaaaaatatgcggtcttgttactatcttcaggttttcgatatataaaataaataaatttattttagttgacctaaaggcgcgtccttaatacctgatactccttccagttgaggtagttgacgaaatctctctctcattgcatttctaatattcttcattaattcatatctagatagtcggttacttgatttgcgtaattcattacatagattccatgtaaatgcgccatgataatcattttcaattttggcatcagcacttgtttgatcagattgacatcctgtcattaatactacgttagggggcattccctcttcttttaaagtgtctgctaatccgtgattttcaacttggcgagtagatagttccctattgatttcggttggaggaggtatatatctaggaatttgatctagacttaagaacctcagcccagtaccactatgacaggtgtctaagtatacctcacacaggcatttctccggtatggccgaaagttttttaccgaagtcatcgtcatctattacagtacccaatgaccaatttccttcctctacatttagattatatgttgtaaaaacctcatcttttaggtcttcagtttcatcctgtgttatatcaggtatctgtgtaccgtgagcagctaaatgtatgacaatataatcgcattcaccatcttgtgattttttaattagcgaatctatgtttttataaatattttccttggttgcctctgaatcctgcagtactgttatatcagaatctttgaaattcaagtactcttttaataccgaagacatattttttgcatcattaacacacccacgtaaagcgtagtggggaaaaaattggtattggttaattcctatagtcagggcctttctattattcatattattatttcatctgatctatttttagaaccaactcgaaacctcattccaaacttttttgactgtctttttgactgtgggattctgataaactttataggctgtatgcgcacctgcaatgatggcggcggcggcgacgcgttcttgatcttcagaagaaacatttgctgacgttaggtccctagatccttgcgtggcgtcgttcttaacctgttctaagatagcacgaacttcttggtcttgctccggtgaaatctcgcgtgaatccgaacccttgaaacaagccacgagcttatcaatcaggtctgaatgttgttttacgtattcccatccctctttcagtaaacgttcttgatctggtgaaacatctgttccttttgacatgtgatcttctcatcgttatccatctatttaagtttatatccaatatcccaaaatattgtatcattaatacaatcctttaatattactaaattaggatttaccctagtcaattattgtctaaggattcaattatattattattttaattgtcaaatactttttgaaaagttaaatctattttaataaatcattgtatgtttcatatgttatattttaatttgaatcgagttgcatcactgccagtaatatgtctcgtacctgtataaagaggataaacaaagaaactatctttccaagcatcatgacgttcattctatatctaaagcgccattttaaaagtcaccaatgtgggcaccagcactgggttgatcgttcctacatcctgcgaaaagaacgtgattttcatgtactctttcagtaatgcctcccgtagtccatggatattaggaacgatcctaaaaaactgttgactacagtactaaatgttgggactaaatggtggaacaattataatgttgaatccaaatcaacgcttactaaagttggaaacgcagatttaggagtttgtgggagaaattatttatccatttatttttttatcaagtatttgacatacgttatctaaaaaagagtttgggcaaagaacaagacataactatataagtatctaaagaattcttctgcatctatcattaatactcaatcaaaattaaatttgtaataccatagtgaattgtttggcgccgtaaaattatactgaaaacatcgatcgaatcaactattggcttcccctaaacccttttacaacagctattataggaaaaattaattttatgttaagataatgaattagccaaaacggttttagaactaccttcccgtacgagaacgataattgacatttgttacttcagctttagacgcgttgtttccttaactgcccttttgggaatccgtgtcctgtgaattggttgcttctattaattgtacttgttgaatcagttcaacgtgtgcccttgtgtttttttctagtaactccagcatctcttttagatctccaatttccctatgaggtaatgagttatcagccttatagtcataatcggttatagactcaaaagcgcgatagtgagatttgaataccatgtcaactaccgataaatttgcaactgccttactgatggcatcctgggatttatagaagaacattgaaatcagaacgcccataccaatcccaccactgaataaactccaaccgtctgatgttccctttatccaagcataggtaattgcgttcgcaattaggatcgcacctataattaccagcattatatttataattgtcttcatcttgaaggctttcttggaatcattcaagatatcttcaaagtgtttatccatctttttccaataaccttccgtgtcttttgacggtcgcggggcaatcgatcgcctgtcatcattcagtaattcttcgttcaatgtacggttctttactggagtatcaaagccttttttcgttcctgtggtagttttatccttctctactgatggaatgcccatcctactattgggcacattagggtcttcattacttgacatatatttgcatcaatgaaacttcgtattataaaaatacgagggtctcgaacaggttctgttaacttacgacaagaaccatagctaggcgtatcctagcatttaattgtagtatgaaacgcaataggacctacccatccaccatccgctatggattgtacctatattttagttctagaagcttgaggttggaagcgagatgtttgtctactgtaattacaaggactcattaagctatctggaaatgggttcagaaatattcagattgtgcagacagggtgttcaagatggacaagcgtttagtcaaggagatatttgttgatgaaatgcttcttcagatagatggtcatggctatcggttgtggatagcctatgagcccaacctagacgtatgtctgatgatgcatctttctcgcgagaaaacgatatttgtctgttaccagttctttaaacaacttcataataggtacggtaggaaatccatatttacagacggtgccttgtgatagaatgatacttgcaaatggttgagacggtctcatcatgtatatgatactgaacttaagaatctgatggagaggttcatccagcacattaaggatagaacagaatactttgatgaccgatttccttgcaggaaatcaggttgtgacagacaacatgtttggaactggctgaagttatttgtaatatgcttgcctatggaaatggacaggacacggtttacttcctttttgatagcagatggtggttaagttaacagagccgctattttgctgagtgggtttattaagtcaaatctgtcttgaattccaccgaacccaatactagttttagtaacgttaatataaaacaataccgacatttatattcatttgtttgtattttaataatttatgaagtagaatccttctttaccaggataagtgatttttttgtctcatattgttcgcgttatttgattaaaactctcgaggtaactttactttcctaactctataatgactttaaatggatgcggcattaatcaaatcaccgagattgtatctgaatcatcgtttaagaaatacatcaattcattacttgggtttatgcaataaccaatatccaaatatctagtgatgatgttatatttcttctatatcatatcgagtaagccttaattacttttcgagtataaaaagcctatatgcgcaccacagatgaaaaagatcagtcagagcgtgaatctccttctcctgatctattagaacgatttaaaaaagaggtgggtgatgacaagaatcaaacatgcaatcaacttgatgctaaattgatgcaaaaaattattgattttaacaccgaacttaagaaaaataatctttacataaaagtaactaggtgccatcgttgtcaggatatacaaaaggaatggcactatgctaggatgatcacatggagtaatagtcagatacagacaaatgtaagggctgctgcaaacacacaggaaaaagcttcagagattcagagaaatgcactggatctcttcaaggaattgaaaaaaataactgatgatcgtgaaggtataagagaggcgcaacaagtagtaattgataatgacttaaaacaaaatcctgtagccgcagtagaagatgattgtccatgtggatgtaggtggcctcatagtgcacatacgtttgatccttctctagcaatagatatgaacatatttcgtgatctgttgggacccgacaaagcatattctgacgcgagaagagtagccgttaattcagacagtcgacccaaacaatttcctgaatatcagaccataaagaatattgcacaaaaattaggcttagcttggggaattgactggagcgttggctcttcaccttatttacctgttgacgcaatacattttgaaatatctggttccactaaagctgctctgccaccatatccacaaaatcctggaccacttgatgcgtggagtctaagaaatgttggacaaggtggaagtggcccactaaccaagggcgatagcagaaaagatctcgttaaacatatgcaacaaatgttagttgatagaggcttttccgtaggtccaaaaggcacagatggtttttttggtgatgataccaaaaatgccgtagtagcatttcagaaacacccacagtatggaaaggacttgacaactaaacctctgtctcatgatggaataatgggagcattaacagcagatgcattaaattcatcgatgaaagcgaaatggtattctagatacgtgacaccgcaaaaactcaatgacaattacgatgctctaagtagaggaactaccggtattttaaattgaatactcgtggtctgtaaatcgtaaacaggataaatctccttttgagttaggattgatgaccgtttgtaaatgattactctttttatgatactgtatgtatggacaaaatccagaaataatttttgttgcaaggtccaataagctaacttgatttattttgcgtgggagctgtgcaaaaacttgtattcagactttaaatgaacaagatacaaagactcattcttttacaattctatttgcaataacatctttttacgaactacaacctaaaacaaatgttttaggtaaatgaaatgagtaaagagctggtctatttctgatgtttatattttttaaatatctttttccctgtagaatcctatttaaaccctaaactagattagactagtttctgtaataaaagatcatacaacctatgactactgaagtttttctatgctaaaacatgtggataccctcatggtttcaatcgaataggatctctacgttagcaatgttgagtaataaaaatggaccaaatttgtttcacataccaccgaacccgcatagtatacgggtctataattgtctaaccactttaagcaccttttttaatgtatattttattttaagagtaatggaagattaaaggaaaaggttgaaccttttccatccttattgtttttagtccatatttttccaccatgagcttcaataatattctttgaaatatacaatcccaagcctgttcctccttttgatttggtgatgaattttgaaaataagtgattggcaatagatgagtctatgccactaccagtatccttaatactaattactactttttgttcatcagattttttttcaataaggatctttatgataccttcttcagtaaatctaatagcattatttaataaattggaaattacttgagttatgcgggttttgtcagcaggtatgtatagcggccttattttgtttttgcattctagttgtttttcttcaatttcttttttcttatcctgctcctcaccattattacttttatcaaaataaaaaaattcgtgttttaattttatatgtttaattttaatttgatctttataatcttcaactatgtcggatattaaatcatttaagttaaacgattctttatctaaagttaacttattagtttctatttttgtaatctaaaatatcatttgttaattgaattaacttctttgtatttctatcgatgatttttaatatgttttgaaattcattttcgtctggcttcttctgtgctaaaatctctgttaatgcgagtattggctgtattggattttttagcgcgtgggctgcaatatgtacaaaatctttctcaagttcttctgctcttttaatttctttactagttctgatcgcttccaaaagctctcaaatatggatacataagataatacagtagccctgctgttagagtatgttgcaaagactacagaatcaacaaatttgttgattggaaagatattgagcactaaaaggtacatgacggggggaagcacaaatccaaatgaatatccacttcgaacaaagcctgaaagcaatcctcgcgacttctttggtaccatttccacagtattgaattagtctaatgaatcaatcactatcagatcttctatcctaagacttgcagttggaaatgattcaaaaaatactcaaagcttaaaaaatatctgataaatagtgaatttcacacattgttaaaaattgattaattaaaatatatgaaagcaatcttagattggataatgtatttcaaaaattttttgatgtaatattaaacacttaaacatattttttgattgacgtctttatgtaatagcagaggtttgaataattgtaatctgatactaattgaaaacttggtataggtattctcttttttagactggttttagtcatcgtgtattaacaagaagaaggtcaataattttgtctattttctctatatctgcaccataaatttttctaatatattcaaggccagataggtgttcttcttctgaaaaggcttgcactccatcctctgctattactattttcaatccccttgtaaaagcatcgtatgatgtatgttttccgcaaatatgtgtatgtactccagtaataattattgtgtcgacgccttttccatcatacgccctggttaaagcactgtctaacttagttctatcaaacgcgctataggttcttttcgtaataacgctatcaccctttagaggtttcaactcatcaataatttgctgtccaatggtacctttcattgcatgcggtccccataggtctaattcatatctatcagtgggaagatgttcatctacacaataaaagataggaatttgagcacccctagcgaaatccaataaagtgcggatatttggaataatctctaacgcccgctcgcattttaaactacctttaataaaatcatttaacatgtccaatactaaaattgcatatcttgccaggtttttctcacactaagctaatactttagtacttgatattttcctttctaatattataccgtatggtattttgatgcttttagttagacctgattccaaaagatcttaatgataacttacaatttgattattgcatcaatgaattatataaatcggagatagtaacattctatggatttatctatctgaaaaattaacgatagagggaagtatgatctttactttaacatctaaaagattttacattaaccttttcagaaagcggcccaaaccttcccttatcggaccagcaggtacaaaatataaattaaaaaattataaatgattaaagaaccatatgggagatatggaacatagtcataattagaacaatatgcaatcgttgatgattcttacattaactttatactcctaattcatctgtcagctttaacaattttttactgtaacttacaggaaaactctgaacttgatccacattcgttagaaacggaatcatttgaacttgttgggtatgatatagttgtgttgcatctagtgaaggtaacgactttacaatagagccattttcaataatcttttccaaaagcggtagagagccttcaatgagctcgtcggcaagtgaaattatgtcctgaatcaatatccttttatcatcaagtattcggtgaatttgtttgggacctgggtatgtatgtttaccaggacttgtttttactttatatataattgatttttgtgtacttgcttttccgtcagtattctcaatattattgaaaagtttagtttctttattacttcgatctgatttgtcctctctttgtattattgtagctaccattttatatacgccatttagtaccggatcgtctcgtgatgtactaagctccgtaccaacagcgaaactatctattggagccttatttttgagtaattcttttataatattttcatccaagtcaccgcttaccattatttttgtactaaaataatcacgatcacggttgccagcttcgtcaaacatttcccttatctttttacttaaatacaacaagtctccgctatccagcctgactccttttggtaatattccttctttgatcatcatttttatagcgtttaatgtatcgtaagtgtccactagaaggtaaccatcaggaaataatttttggaactctttaaacgcaattatttcactatcaaaactcattataaatgaatgtgccatagttccataaacagggataccgaattgcatgccggccaaagtatttgatgtacctgcacatcctcctacataagcagccctggccgctaaaaaagcagcttctggtccatgtgcccttcttgaaccaaattcaattatcggtttgttattagcaatattacaaattctagaagcttttgtagcgatgagagtttgaaaattgattgttgataaaaggtaagtttccaataactgagcttcaatgattggagcttcgattctaagtattggttcagtaggaaataaaacagtcccttctggcactgcccataggtctccagtaaacctcattttcagcagataatcaaagaaatcttgtcttattcctctaaatacatctagtgaccttaaatattctatttcatgtttgttaaacctgaaattcaaaatatattctactgattgttgtaaccctgcagttactaaatatgacctatttttaggtaatctcctcacaaataattcaaagataccctttgtttcccaatctttgtgatattgactgaaataatacccagcagccatagttatttcataaaagtccgtcaaaagcgctgtatttccctcgaaattattaccatcagtatatttcaatttagtatattttaacagagtagataataagcccatacgtcaaattaccgcattttgagattcgaagatggtaaattcaagagaaaatgataagtcatactgtttgtttatactattcaaataatgctgaacatattcaaaaggcctcattttcaaaataaaaaaacaatatacattatgttaatagttttctatatggctttagttgcagatacctctatacacgttctttctgatataatattcagtttttccatttctatatatggaatagcactctttattgctattggaatagcttttatcatatgtccattctttatacttaaccacaagtaccttccaaaggatctcggtcccatgaaactcggaagattttcaattcataatttagttcagttcgaacaaattattttggcagcagtaatgtttgtaatcatctttcagatcctgctcacactaagttatcacaaatatgagcttatgatctcgatcgcaattagttacggaactgctactgttcttatgggtattctggctagcaaattgcttaaatggtttacggttagtagaagtatagtcactcttctatttggaatagcagtttcattgataggaattaacgctgcagtttcattgatatactttgaatacgttatagtgtacgaaagagaaatcagcattataacccctgacatcgtagtcctttttgagactcattttccagatggttcacccatgtattttatttcacttatacaactatattcgatggcaggatatttcataatgacttgggcggctacggtccttttgctaatacatcattcaaagagaattggaagaacaaggttttggatattagtaatcttgcctatatttttgtttacgtacttttatgcaatattattcgattcagctattccaaataaccccgtaactcaagcaaccccacttggagatttatcattttggttatcgtatgattattcggctgcagttattggcatctttattgggataggattttattcagtggcgcgctcgataaaggataacaaaattgccaggtcctccctaattattgctggatatggttttattttttattttattgcggcatttgcaacagtgattcagacaggttatcccccgtttgggttggcgaatgtctcatttgttggtatggcggcatttatgatctttacagggctttataattctgcggtgtctatttctagagacgttcatctaagaaatatgataagaaaatcagtcctacatgaagccagattcttatctagtattagcatggcacaaaatcgtgaagaaatggagacaaatatctttaacatcactaagaagaaatcagatgaaatgtctaaattagataatatttacccatctatttcagaaaatgaaatcaaggactatatgaatgaaattatggaggaaatccttatatcaaagcaaaaatcagagaaatagattaatctctttatttaatgcattgtattggttcaaaaaccttgcaggttggttcaaatccttaaggtctcaaatggttcgctcgggtcatttaacgaaatcttatagcttgaagaataggtcttattctatatgcattatagtaataagacatctaaggaatacgtctatgtgggtttgtatttgtactttttaagcctatatcttaggagaacatttgaaagacttgtctgttttttcaagagaaatcaagtcacaatctggaataggattcaaaaatatcatcccgagatgaggtcatctaagaaaataagtactttggaatacatagctgattggaattgtattaagtagggtcaatgtggctgtggtttgcatttgaacgagaaaagagagatccttgcactatatataataatcaacattaattcgcggatcggatctgttaacttaaagaaaatcctatagcttgaagatgatctatctctctttgttatacatgttaaaagaaaaagaacacttttaaagtacattggctatggtttttacttgtactttctatgtttatttttaggaacacatcgaatgcgccagcttgatttgtcaagaaaagtcatcaagatctcgaaaacatataggatctacagaggggagtacgtggatatccgcagatttatcacttcctaaagctaatgcatcatttgcattctccatatgaatagagttttattgaaaggaaaatgcgatacatcaaagacaaaaccgaaagttttgatgactactttccttttcgaaagtaaaattgaagtaaatcatatgataaattggatgaatctatttgttaactatcatattaagaagttgatttggccataacgtaacagaacttcccaaagagaattagatatctaaatatgcagagatcgatatttcaatttgtagatctttttccattggttacttcgcccttagtagtttggatccaaatcattaggtagcagagaatgctactatgcatgaagtgaaaatcagtttcactttttattatgttcattttttgtttaataagaaatggtatacaacagaatactaattctaaaaagtggttctaaatgctaataaatggacaatattgccatatattgtatacatcatccattaaatattaatatcataaagtcttatatatttgtatggatttatcagataccatgagaacattttactcttataccctcctaatactcatattaggtataatcggtctctatggaacaaatagtttcccattaagtggagcgcaaatgtcgatgtcaaataatatgacaaactgtgttagtgattcaatcaatcagagcaattatttgacaaaccattgtacaaatactcttatcaaaacaaatgatactatcacagatttagattgtaccactagcactggatggtatttgaattgtgcatggttacaacatgatagtttgtccaatagctcttcttcacagttgggggttgctgctagcttggatggaggccaatcctttggtaaggcactagaagatattactaattcgacttcgcttatccgcagtttagaaatcgactcaagtcatgaaaatacatacctaaaatatgaaaaggaagtaagcccgaatgtatttggggtatttctccaagaaagttctgacggtggtcaaacatatgatccagctattcaaataagcaatagtaataccactatcaactcatcaagtttgttggtagatgaattaacaggcaaatatatcgtatattatgttatcccaggtgatgatgcggtcaagatttattgtggcaaatgttaatccaaatactctttttttgaaatataatgatgaacatattagttgtactgttatttctattgataactatgtttggaatctttttagaatttaattattcaaatgcttccactgataatcaaaaagataatcgtttcatttacaccgtttcctccaatttatctgactctaatctgcaaccttattcaattattttgggtccaattaattcaactatgaataatatttcgtcatttacaggagaaagccctgataaagagaagtttaatgagttggaagagaacattacagaagaatccattcaaacgtcaaccaattcaaatattcctgtagaattgtattccacaacaccgttgaccaagattggtcccaataatagcaatttatctgcgctacaaaataattcaaatctagcggaagtaacatcaacagtagaactgggattaaacaataatctctctattgtcaataaaataggtctaaacaatataataccccctgatcagctttattatcgaaatgagccatcattggctaaaagtagtaacactactctattagttggaacatgttatatggttagggcaaccaacgatattcaaaactggcaatatatagatctaagacaaaaatgtaattccataggaggagatatggaccttctttatgacagtcgtaacgggaattttatatggagtatgatgaatctaccgactgaaactgagaacggacgttatgcaaataatatttcaatcggcatttctagagattccaataactggttaatgtatgatctttctgctgaaatgttgaattcaaattggacagaaaatttgtttgattatcctcaaatatcatttagtgacaaattcctgtatattagtgtaaatagattcagtaactttaccgcagaaggagctacctttgatggtcctttaattatacgtattgacagagacttattaagctctgcctcttcgtcgattccaatgcactatttatcctcagattctcaaaatagagtatttacttttgtgaatggagccaaaaatgctatgtattggggtacccactatactgatccactgagcgataagataaggatctatgaatggaatgataactcgaatattattagttgggtggatagacttgtacaggattggaataattcagacgaattccaatgttctgtggatatacgtcatgattggtgtaaatcctctgacagtcgtatcactacaggttggataaataatgctactattggttttctttggaacgttcctcagggaaatgggtttaagacatctcacattgaaggtgcagtttttgatattagtaatttgaattatctcggacccgtgtatattacaaatccaaatctacatatattatatggtaacgtttatcccaaaaataatacgatcggaatagtaggtgcttacagttacgttgaaaacaacgaaacatcatatcctaataatctcgttggaatcggatatatgtccaataatggcagtgttacctggagtttgaagtcagctgtgaatggtacaaactttccatatgttaacgaatggggtgatttttaccgagtgatacctcaatcagaaagcagtgatgtttggtctgggacaggttttgtgctagaaggcggagtggacactcatcacataataccatattatatagagtttggagtggttccttgactagtttgaattgatataggctttaataaaccacaattactccttttctgtggatacgacggaagtacgggtggaaatctaaagaaaatattttcgagcatcgatagcggaacattatctttttaatgtgtcaaagatgaagttcaataaggggactccgaaggcctaaagacagaagtatatttcgaaaaaacataggaaggcatattattaaacaaacaaagtgatgattaaattattaacatagacaattattgtagttgaatcatacatcatagttatcgtcataacaaaaataaggaattttttatcttgttaccaaacccactaaaggaatgtctgtaaattcattgaataaattgctttgtttatcaaagttgatcaccaaaatccgaccatccaaaatagatatagatactttggcatcttcaaacgtgttagttgtggttgagccactgacaccagaagcgagattcttctcgattgtatttatagtacccttgtatgttatatcagagtcttgttgatttacagtagtaactctaaaatttgaaagattgtactctgtttcatcagactgcttagaagctgatgatgattctgtttggctaggagataaattgacaggttgttttgtgaatgtggttttaaagtcaatttggttttcactattagtttttagtgaccagtttccaaaaatgctgctaattatatttccagtttgtaggtcatactcggtgcttactattgcacctgacaggttcttattgataaagggattcatggatgaggaagagataattgatttgttattacagtcgtttttagtagtactactagtctgaccattattattcgtttgagtttggattgaaatactattgctgcaattaatattattggtattattagcgattgtttgtatctctttggtaattgacgattgtaagtttttttgaaactgttggatcgattggtctaaggtagaggttgcgtctgcagtactaatgctatgcaaaaagccgaagaaaaaaactgatgaaataaataataaaattgggaccagaattcgtatatttttttgatcaggtattaatgacctaccggtaaaaagtcttaaagaatttgtaaaaaacgatattttatcttttgtcatttactatacaataatagtagtataatgttttatataggcttgacgggaacaatgttaattgataatataactacattggattattacaataaatactgtactgcctaatatgacaagagattaaatagaaaacgagtatattttagatatggctaacttcagattaagtacaaggaaataaaaaaaacaaattacaattatagtgattgaattttattatttttaagataaacttgccgtgatgctattagacggttatactgagacagcaactttgataccaatagtttttagaatggctatggacatcatcacaataaggagattattcataaaaggtcaataaatattagatttacagaaaaatgccatatatccttgttcacatcttaattatatcctacttggtcatcaaaaaattttgagcaagaaaaatttgttaaatataccaccacctagtatttttagggtaccactaacctgagatcccgttttatacgttttttcatttaattgtattctaaatacatttatatttaatatttaacttattcctaattattttttttattcaaagatgactgcataattttagagactaattttctaaattgaacttttttaatcctcgtagcaaaccaaaattaaaaaacaaatgacgtgggacaacaaacaagataataatgtacagttattaacaacagaatttagattagagatttaataatgcaatcatactctctgttatcccattattcatcccgatttagtactaacatcttattgactccattgcgaaaatcatactttactttttcgattctaaatgaaatttttttattcatatgtttatttaagctctccatcaatgtttcaaaatattcaggaattttcgcgtctggtttttgaataggaaaaattcttacttcctttgaagtaactcgcagcatttctaaaattgaatcatgatgaaaagtataatcaaacatattgtgatagtaaaaaaggaaattagagcttagtactgaatcaaaacttttatcattaaaaggtagatttggtagtatcgcttttacatatctttcatattttttaggcggattatttaccatcccctttgttgaataatctgaaatgaatttcttcagtgatgaggctcttgcctttcgaagctcttcaatatttgaataaattttccagtcgtaaaagtcgggaactttagatagactatcaatcatatattcaagatcgtcttttcctcttttttctatgattgatggatcattatcatacattaaatcgcatccaataacctttttaacattatattcacctgaagcttctgcaacaaacgatgatgcaccagagggacaatcaagtattttaagatctttaaaattggtcaaatcaagattaaacatccacatgtattctgataaagatcttcctatgaatactactctatctagattaagtacactgcgctcatcggcaatgctcttgttatttaaggatcgatctgacattctcagagagtgtagtgttattatcagaataaattaattatgatttcatattggtgtaaatgaattcatgctattttcagaaccattcgacaatcaaaaggttttagtacaacagaaaaagctgcaacctgatcgctattcaaacccccattacacatttcttgattaacaaaatattttgaacaaaaagagatgtttaaaaaatatcagcccagcactttagctactgaacacggtattaattctcgattttttccatgcttaaattgatcaattgtttatctttttcttccaaactgctgatccaatgtgtcactttgatacccttgttatctttctcatacttgaaagaatgacagcaagaaaaattaatttcattcttctattatcaaatgcttcatccaaatacttcattcattgtaactgttttgaaaccactatcgtaaagatatctcatttcagacctaaataaatcaatactcgtgctatactcgcctctatcatcatcaatattatgataaattattatgggtatgttatcaacactgtgacttttttcactatattgatctacatatgctttgaacgcatctagcatttgtaaatcagaataattattctcttttctttcggcgtcatggctccaacccacgatagtatatttttcatagcccttaagacttctaacacggtcgctacctgtttgactatcgccacctgcagtcctagcaaaatcataagtatttgataccaagtccaaagattcctggtcatcatcacctgaattgaaaggatacgaaaaactgttaatattaaggcctcgatcttcaaggcatttctttgactcaacgatttcattatatttagaatcccgtgtaatttggtctaaatttacatgattcatactgtgagaccctatctcgtttccttcttcttgtaaagtttgtatttgcttccaagtcaatctattttttccatctatgtaatcacatacaacgtaaaacgtagacttgaactgatattcatcaagtatagcttttgcattttcatattggcttttccaactatcatcgaaattgattactgcaatttttccatcactaattggtatgttagattttttttctatgttttcacttttgaattcatcatttttttcctgatacttatttttgtagaaatctaattgtgaatttgattcatttttagcattatttgattcaggttctctcaacttgctcataacattatcaatcttcaaatctttatcataattgtaatcaatatgatcattgtttttaagatgctctttctcactttgaagaaaaatatcagagttgactctgcctggaaaatttgcatcatccatttttggactagtactattatcatcattgagtgaattaggggctaaactatcaccctcggcagaggaaagaaaatcaaatggaacggaataatccatctcctcaggaatggaaaagctaaaagcattattatttataattgtacaaatagcaaaagacataacaattatttgaaccagaattaaaattattcccaatattgatcatcatagtcagtagacaattctatttatgactgcagaaataatttatagatgctattagttagttaaataatttctaaatttcaatgtaactttgttaccaagcttttatctaatactttgttgactattccaataaattaccagagtagaaaatgccctattaatcacgagttgtataaattttaaactaatatttagccattaaagataaaagaaagacaatctataatttattttctggataggaaaataagcataattgaactggacatacatgcccacctttttacaatctgaaatattaggctagaaaatcttttacaataaaagtattatgataatactattttaaatctatcaaaaataagttaaattcattttatatttataaagtcaataatagagaaattatcaatggatgaaatagattcaaaaatattaagaagactgttaacagatgctaggagttcgtatagaaaaatagcatttgaattgggaatttctccacctaccgtacttaatcgaatatcaagactcgaaagagatgaggtaataaagtcatattcggcaatggtagattatgcaaaaattgggtttgatttgacagcagtaattgaagttactgccattaagaataaaataattgaggtacaaagacatatttcaaaattttctaatgtttgtgcagtttatgatattacaggcttgactgatttaataatcattgcaaagtttaagaatcgttcggagttaagtaattttgtcaagcatgatttatcacttccatatatcgatagaactaatacccacattgtcttaattactgcgaaagaagatttcaggttattgtgatcttaaatcaggcactattttgataaagtcacgcatatcgtatttttgattatcatccattgatttattcgttagggatattatggggttttctattgaaaaatcatttaattgttcaatacacagttctttttcaaataccagcagtgtttctcttattattgagtaatcttctgttgacaatctatcaatttgtgcaccttcggctgcagtagttccgtttggagaataaattacgcctccaaccatccctggaccaaataattcacctggcaatcccaaattaagcaatataccacctgacatatacaaccccgaattatatcctgcgccaaaagttaccagtcttccaccccttgcctgtcccatcgccctttccatacatccttttttgatcaagacgtccacaccggtactaaattcagttgcttgattattttgacatgccaattccgtggcaaaaccctctacaattattttgcctttataacctttatctgccaacccattctcgctgttcccttttactgtccatgtgccatcaaaattgcaaaatgctccaaaaaaattacctacgttaccatctaccactagatcgagttttattgtcttgtcaaaactgagtattcctattctgtatagggaccgtgggttttttattatgagcttagtttcgccctcgatcacctttttacttatgattaaatttattgctcgttccattatcagtggggagcttacaatatctccaaatttttcaatcgatgcacgttttataccatctgggaggtttatcccataatgttgctcaaatatagtgttaaccctttcaaattgcgtatccggattagatatttttgaacctatttcttttactattaacccaagttcatctatatctaacatgtaacacattaatctttggtcgttgattcatgccttattaatttatttattctatggcaaaaatcagcgacttgcctggtgacgctgctttcacatctttattcgccccgatgatatccaatgcagatagatccgtcgccattgcccaaaatgcaggaatcccatctgacccaggattataccccacaataccctttcttgttccaaatctatcccttactaatgacaatgtacgattagtagaagcaatatatgtaaaaggtccatcagctttttggataaattcatcatgtgccctttttaggtcgccatgctgtaatagctgatcaacaagaaatattgctattacctctgaatcacagctagaatagaaggggtaccctttaatttctagcatatttcttaatttggaataatttgctatttctccgttatgtactactgcaatatctggcataacagtagtactaaatggatgagcattgcttggatcgacgttactgcttgtcgctattctcaaatgtccaatcccgtgagtccctttcattgatcttatattgtattttttatcaaggtctctcactagacccacattctttatcaacttcatttctttagtgtaacccataattgaaacgttttcgtctttccttaacctggaaactagttggtcggattcttttgaatatttaaatcctgtagtagtcctttcttcccttagttcgtaatcattttcacacttcataagataggcaagattagaaaacgaattgctttgacaattctcgtcattattataaatggctattccggcactatcttgtgctcttacttgctggctttccatcatcttgtaaagcaatgcgcctactaagaaatttgaatcggtatgttcttttaaaatgatcccacaaattccacacatgtttcttccacccctccattacctatttatcaacagatattcaactagttcctgtttttgagatttattcagatctagttgttcttctgtcgtatacttatatataaaatcctcaattatttgacgataagttttgtttgttccttctattgcaatatctgcctgtatacttgcctcaatacttgatgtacgcaaatctgaggatgaaagattatagaaattactataacctaatgcggcaggtactcctttaagttctcccttagtagccaacacgtgtttgtatatcctatcggatactgtatccaggttggattgaacctcatagtgatgagcagcattagcaattaataagcttgtggagtatccaatgatatctgcacctaatgcagcagctcttacaatccttccagtattattaacgtctccagcaactattagtactgtcccatcattttcctttccggcatagtactggtctatcgcgcatcttatatcgtgtataacttttattgcatgcatttctttgtattttgatttatttgttattttgatagtatttgcaataatcccatcagctcctgcgtctaacaatggtccaagaaatttttcaaaagaattatccacctcaacaaggattggtccattaaatttttttcttatatcagtcagaaattgtagggacttttcatcgttgcattgtaatacaaggccatcggtgccataatcgtcttcttcttcttcctctaatactgcagttctttcatttaatcttctaaaatgtgggtaatttctattttttattctattttctgaaataagccccaagtttgtgttaaagttctttagtttatttaacgcaacgtggagtgactctaacgtcgtttcatccatttgcatgtcattatcataaattatcaaaggcattgatagaataactttgttgggacattgtcttcgacctatggatatatcaagattgattatttctcgatatggatcgtatgggggtcgcgatagttgtgcacctaatgcagtaatacaattccacaagtcttcagtttttggctcatcaccatttttttgttcaagtcttattttatcatctatggaaacattgcgaggaaggcctgtttctgctaattccaagatagaagatcgtattataaatttttctttgatattcatttttattaatctccgatacatcctagtgtctgtacattcttactctttatcttgttatggtaattcgtatcgtttgtagacaatcctgataccaagttggatatctcatctgtggcaaaaagatcctctttgttgagatcccgtattctattctttcctaaagaacctacgatattttgcaattcgatccttgttcccttaatataattgactattctctttacactggattgtatgtttaatttttcatacgacccagttaatcctgcagggcaagaattggtataacaatcctgaaccaatgtacatcccatcgatatgagaaaccctgtacctatacctacaccatttgacccaagagcgatacattttgcgattcgttttgaatcccaaatgccaccatgagcaattagtttaaactctcccatatccctctctgaataataattgtctattgcatctttagccaaccttattgcgggtattgtgtttacacctatactttctcgaatctcccaaggagcagccccagtacctcctacgtaaccatcaatagcagctgcatcagaacaagatttgagtattatggcaatatcgtcatgaacccttgatgcccccacttttacaataataggaacattccagttagtaagctctcttaactcaagaatttttgcaaccagatcttcaggtcccaagatatcaaggtgtcttgatggggaatgagccgacttataggcaggtataccacggttttctgccactaattctgtcactttcgagcctggtaacaatccaccatgtcctatttttgcaccttgtcctatcttgatctctattgcatctgcattgagcaagtagtcaggatctttccaaaatcttcctgatgcatattgaaccactaatggatactttctgcgaaaaagctgttctctatctatactgtctaaattgtgttccttaagtagcctagatacatattccgttatattgggatcaccattgttaaaatcatgaacttcccaaggtagtgctcctccttccccagtattcattataactcttattccgtcatcagcaagctgatttaatgctaggtgcaatgctatttttgcaggaagttttaatgacccatagctcataccagagacaaaaaacggaatgtccgtggttatttttctgtttgaataaaggcctccaatagttaaggatagatcgacattactataatcaacgtctgttttaatagatccaccaatgagatcgatggaagaaaaatagtcatttgtggaattagcacctagccctgaataaggaataagaccgtcaaatgcttttcttgcatctagaataattcttgattgatcgtaatataagaaatttaaattatcattcttagcaactacggaggtagaagtaacctcttttagaagatttcttttgatttctaatatatctttaggatacgacatattttacctaaacattcccatacatatagaattctctaggcgaaggtattgcggctactgctgcatgttcatcctttttaatctgacaatacatctcaataaagtcggctgcaaatacagggttcaaaaaatcagcatcagattctagggactctatagcttctaacaaagaggtaggcaattttctaatcccatattctctcttttcttgctctgtaagtttgtagatatctttatccacgtggtctggaggagatatttttttgttgataccgtcaagtcctgctagtaataaagccgactccacaagataaatgtttgaactcggatcaggtgtcctatattctattcttttttgcttctccatatttttataatgagacggtattctgatgctagctgacctattcattttactccacgctacgttaattggagcctcaaagccagggactaatcttcgatatgagttagtagttggatttgttaaagcacatagtgctttagcgtgatctattatgcctccaatatagtaatgtgctgtttgacttagttccgcgtaatcgtcagaaggatcaaagaacatgtttgcgtcatgcccgtatttcttttttgtccataaactctggcttacgtgcatacctgaaccattgtcaagggcgactggtttgggcataaagtttgcaatcatttcacgtttagcagcgacttcttttacggtcttcttataggtaactacattatctgccattctagtaagatcgtcatacaccatttgaatttcacactgtccggcggttgcaacctcatgatgatgtgcatcaacttgtattccaaaaaattcttgcagtgtttctgatacttcgtctcttaaatccgttaaactgtcggctggaggtgctggaaaatatcctcctttaaatggaatcgtataatcattaccgcctgaagaattccatggtgcctctccagactctattgaatatcctgatccaccagaacaatttaccgaagacataggacttggaagaagtgatattttattgaatacaaaaaattctaattcaggtccccaataacttttttcaaaacctttgttctttaagaattcttctgatttttgtgctatgtatctacaatctctggaataccttctccctccatatccgtcataaatatcaacaaacatacgcgcagccatggaaggataggcataatttttcctattatgattattcttgtcaaaatattctggcaagattgcaaaagtggaagggtctggtttgagtagcatgtctgattcatatatctctttgaatccttttatggaactaccatccagtctaggcaatccctgcttaaatgcatcctctgtaatttcaggtactgtttacagatatttgatgaagaaatccaaaagggtcgcaaaaatttagtcgtacccattttatcccagatctttttaattcatttatcacatccatttcagaatttctaaaggttttttctacttgcattgatatatgacaacattaaaaaagataaacttgtctgccatttttgtttacaattgatatatagctaacagatttatttatcatttgttaaataataagtcaaaatatgtcttaaaatattacacatgatagacctcattttcccagcaaaaaatagcttttctttccttgttaacctttatgctcgattctctttgttgattaattccttcacggtcaaatcatttcaaagttactaaaataaatatcatatttacaaagctacaaaaacataggaaaatagaaaaatgttaaccttctttaatagtggaattagagttttaaaagttaaaataaaatataccaggtcagaagatgaaattagtttaaggcgtaataaggccgagagatgaatttatccatacctgtattgtattcctttttcacctctgggatgtctccattctgtttctggggaacatgttccgcattctatgcaaccctcatgttgcaaaactacatcctctccttcaagactgtaacatttagttggacaaagtgtaaccatttttttcataaattcgctttttgagtttgttattttgatatgactttgtggatcatcattgtaacttaaacttgatatccgttgagataattctggaatagatattgaatattcagagatggttttggtaccgagtttttctgcgagatttattggagtatttatgtatgtctcctttgattctatcaatgataacatattattgtaccctattttgttgacaacgtcaatagacacgtttcttaatttatcatttagaaacaacttaaaaagaaatccatacttgcctatctgttggtgtggaatttgcttgcctgcagcatcgattattgttttaatataatatttgtctatcctttccatatcccttgtataaggactttgttggactgactgtgaataaagctcacccaaatagtttgatgaaatatcaagattatttttttctaacgcttgttttatcgcgttagatgctcttgctgcatcatcaattcctacatttaatccctcgattcgtggtccaatgaataatcctcttcctgcagcatcacctatgaataatatgtttttgaaaaagggctttttcattctacagcgttttccgtctggaatcaatttcgtactatactctaattctacataatctgtttcaaatctagtattatatttttcaagtaattccttgtgaatagcatccatttttgactttgcctcctcgatagaattgaattctttatcttcaagaaatctctttttgccctcatgcgaataataatcaaatctcaatttctcccatttttttatctgtttattgactgcaaatttaatgcgtaattgttccatcttagacaaggttttgtctggatagggttctaaggctacttcatctttgatatactctttgacaaatggattatttaacaacgcgtttacaagattgtttggtcctgttggatttgaaatcaaagagtcataatgatatacaactcccgcagatagagaatcaagattggtatataaaaaacctcccccaatgtggtcgagagttacgtcgccagcaaaaatatgggctgttccttccccaggatttagattaaatctttcttctattatttcttctggtaatttgataacaacctttaccccttgatataactctgggggtgaaaatttttgtcgtgctcctgtaatttctgcaatctctgaatttactccgtcagaagcaataacagctttggcttcaaaatcatctaactcgtctgtttcgataattgttttgcctttttcatcatcccatctgatatttctaacatgaactccacttacgatgcctccgccatttatttctgcagactctaaagattgtttggcaaaccaagagtttaatttatttaataacacagaacaaccaaaattagattgataatcatgggaatctgtcaaatcgattgacaggactttgtctttagatacacaatttaggatatattttgtaatttgtctttcccatggtttttcctgtaggaaattttcaaatatatcatcaacattatataccttaccagtttgaggattttttgaatacagtatgccacctgagacgttctttgaacctacaggagatcctgcttctatcaatactgcctgaattccctgagaggataattgctttaatgcagctagacctgcagaaccgccgccaattattacaacatcaaactgttccaactacggcactaccttcttcttcttttgtttgtgtcattttttctcgctcaagctcttctatcattattggtaaaacatcctctattcttcccttaatgaaaacatcgcattcattttttattggagcattttcatcagggtttactgctataataaatcctgaatttttcattcctgctagatgttgagtggccccgctaatacccaatgcgatataaatagtgggttcgactttttgaccacttgttcctattactctttctggagtaatatagagcgaattcattttgtcacttaatttgaatggcttctttgaaatgggaagtgatataccaatttcagcgtttaaaagttttgcaagtttttctattaactttatgttctcttctggagcctcttttatacccctaccaaaactgattattgttttatagctgccaaaatcgattgtgtctttaagaatatttctacttagaactttaatctcaagattttttgtatcaaactctggaatacattcttcaattatcccagtcctagacacatctctttctaatggttcaaatacaccaggaataatactacatgcttgaggatgataatccctctttatttcgggatttttgttatctagacaaagaatagtagtccaaagaaatccggagaaatcgggtctatacatcattaaggttttttcaaatgttaacatttgtccctttgttttatgttcatgtctaaagtcgatatcttctatcaccagtttattaatatcagaggccaatccagattctagttctgccaaaactgtggatgacaagtgtcgtcctgtactatcggcagcaaagaacatgtatctaggtcgtttaaacgctttagaatattctggtgatatcttttcaatatactttgcattggttgctatttgaacaattattttcgtatagattttatttatatgataatttagttttggatcgtctgcaaaaattacagcgtctgcaccaaaataaatcagttctttgcataaatgtttaatattattgcctagaattactgcaattaccttttcatttagtgaatattttttattaaaatcatcgataagcctccttgcttctgataacatttcaagaccaacaggaataattttaccatcaacttgttctataataacatacaagtttctgtatttacttgtctcattaattttatagatgttgtaaacctctttaatctcaacctccttctctttctctttcgtcaaagcagtagtttgatctatcgtcttgttcatattttcattcatttctttcacgctcattcactcattcacacactcacattgtttacgtaattgtttcatggattttctcaagaatgttagagatttcaccagtatcaatattctcaatggtctgtgcactcctatttgattttatttttggaattttttccactttatatacaattgtaggtgaaccaggcaatcctactaattttggatcaactcccagttctttagcattaaatactttcaaaattgatttataattactcgatcttatcgtggcttccttttgatatttcgatgcgctcaatctttgagaaactgtcataaatggagatttgtaagatggatctatagcaataaaaacaggcagaggtgcctgcacctgttctattaggttataatttccgtatgaaacaaggcggacagcagttacgattcgtttctcaatatctatttcgtatctaataacattacctaagaaagtaaaacccaatttccaggcggtttgaggaccagtctgacctgtttcaccatctgatgccctaaagccagaaaatacaatatccattgattttccatcattcatctcagatatccctgtttttagaacctctgcagtagacagagtatctgcacctgcaaacgatctgtcgctgtatagatgcaattcttcagcgtcagataataacagtgattgatcaagagccaattcggccattggcggacccatagtcccaacagatatacgcgcaccatactttactttagcataaaaggcagcttgcgatgcaattgcactatgatgtcccaatatggttttagtttctgctcggtttaatgtcccatccggattataacttacatttccgtcagaaaaatccggctctaatttaataattaccgcaatgttgagactcatgatatttgcacagatgcatatcgtttaagagcttctagtgtatgttacatatttttaactatctaactttaaattattattcagatattgacaaagggtaaaaatccttccaaattttttgcaacatcaaccattaacttgtatcgaaaaccataaaaactgggactcgtaatgcccagcatcaaatacataactttatcgaagtaagagcacgggaggagtataacaaattaaccagatttaatgatttcctgtttctagttatctaggatgctttaaagtaagaatcagaatatattttacaaaaaaactctttaacggagtatctcccatccttgtccaaaatacagtggttggtataatagagaaagtagaagattaaccgggtattgataaccgttcttctggagaaatctgagtgcaaagacctatactcataaagttgattattctccagcaggtaatgggttttgtctaaatttggtttctttttttaatccagtggttgttttttactaaattttttaacgaagacgcggccataattggaggaattttcatgttttttgaaacataattaacaaaattagatttggctctcagtgagcaatcaaaagttagtgtgtcattcagagattggactggattgcgtgttacggactgcaaatagcaaatcagacaaaaatctatttttttcgttctcagttttatacgataatacattttcaagttcttcaaaattttttaatattttcccaaaaagatccataataatttgctcatctagatcatcctgatcaaccccatctatttcataatttgaatgaagtttcttgttatccgctaccattgcagtttcattattgaatacattggacattccagaatgaactgtattattatgccgattcgcattccattttctaccaaattttttcttacagatgacacaaatgtaatttcgaggcataaatttttaataacaatctgtgacctaaatgagtcactccgagtcactcatttcataggtcaattataattggatgattcattgtccaagtattattcaaggttggttgagcagattcatttggatgctatcggagtaggtctaatgtatcaaatctaaaaaaagtaatcaatggtaatcgcaacgaattcactactcattgtctaaaatggtttattgtacccttgaaatctatctgtttattgagttagtgaagagcaattaaaatacacaccattcataaattacgtaagacaagattactagaaaagaggctaaaataaagatctagagttcaaaattttttgttaatgaaatacttccagctgagaattactaaaaaagatgaattggaatttttgtatctataaggttatccctgctttgcttgcttgctcacgatctgggatctgatagaagaaagagactgatcgatctgataaatagccaatttgtcgccaccgagtaaatcaaatttttggagaattgtttgaaataatgtttcttcctctatttgttcggttacaaaccactgcaaaaaggagtaggtagaataatctttttcctttccagccatatccaccaactcataaatggatttggatacggtttgctcaccttgtagaccaaattgaaatgcagatttaagtgattcaaagctattttgaggcttatctatagcaggaacaatcgcttctgcaccagcaccgttaagataatgaatgaacctcagcatatgttggttttcttcgctagcttgttcaaagaagaaagctgcactaccgtcatatccagttctctcgcaccatgatccgattgcaatgtatgcattcgcggacgaggcttcataagaaatttgttcattaattgcttttgtcatttcttgtgaaattcgcatcaataataatcaatattttatattatctaaatttttgctttcatttactagtttaatcattgctttaggcattgttttgtcataaatgatacggttgtagatttcgttgcaaattcgctaagtattcaacaccttcatgaccttaagattagacctctaatactttaaaaaaatattaatggactagttcagtaggagaacaattaacaaaactattttcattgggaatattttttagatttacaatattcgttagtggtagttaattatatattttttttaatagagatcaagttcaaattttaaaaagataaaagataacattatctttttctgcactttttagcaagatactttccaagtagccaattcttctgaatgctttataaaatgcatggcagatacagatttaaatccagtatcagtttatcaggatcagtcatggatcctcttagaaaatttttagtaaagccaaccaaatccgctgcaaatcagataaaattaaaggattgggatccacaatatagcggtagtaaaactaaaatcgagatgttgacagaaatggaacaattttctaaaaggatatcagaattacaatacaggctattcgcagccaatattaaatccttattaattatcctacagggagctgacgcctcaggaaaagatggaacaattcgtcaagtcatggaagcattaaatccccaaaactgttatgtaaagtcatttaaggttcctaatgaaacagaattatctcatgactatctttggcgaattcatattgaagtcccttcaaaaggtcaaatagcaatttttaatcgttctcattatgaggacattatagaacctaccgtaaacaatctaatttctaaggatcaattgaatcttaggtacaaccaaatcaatgattttgagagatatttgtcagaaaacaatgttaccataataaagttcttcttaaatattagcaaagatgaacagaaaaagagactccaagaacgaatacaggaccctacaaaacggtggaaaataaaagaaagtgatttagtaagtcatcgtaattgggctaaatacgtggatgcctacgaaaaagtaataagtttatgcaacaggaaatgggcaccctggtatatcatacctgcaaacgtaaaacattttcgaaattgggcaatatcttatattattttaaaaaaattggaaagtatgaaaccagaatttccaagagtaaaaatagattcttcagaattcataattggttaagtatggtgcagtatgctgctgcccctataatcacgctctactaggcagttaatcaccaaattaatttgaataggtctaacagaaattagtttacaatgtgagatcatcagatgatttttccttcagttgtctaaagaaataagaatcaattgtcaaggtttgaatttttgatgcccatatctgagaaatataagtccgaattagagaagcataaggcctctggtcaatttttctgataaatttaaatcttttatggctcatctaaataagctttcttgtaaattaggttacatagatgagttataccataaaagaggccagtactacaagacacaagaaatctagaaatatagagaatgttcttgtcatgcaagggggtggctcactaggtgctttcgcttgtggtgtattcaaagcattagtaaaacaaaaggtgcatatagatatagttgcaggcacttccataggtgcagtaaatgcagccataatagttggaagtaaatccgggcacccagaaaaagaccttgaagacttttggttggaaattggtgagagcagccttgaaattataccagatttatgggcttatggatgggacagtagaacaagaacatatgttcctaagaccatttcatccgcttctgtaaatgcagctttttttggagttcccaaaatgtttataccaagatggcagtggtggaataccagtaagaactttcatggtatcatgggtagactcgaagagcagtattttgatcctagaaattggacatttatttatgaccactcccctttagtaggaactctagaaaaatacatagactatgataaattaaatcttgctgcaaccaaagaagagttgccttccgttttgaggttaattatgacagcagtggatgttatgacggccaagccactcatttttgacaatacactgatgaaaataagaccagaacatattctagcaagttcgggatatccaatatatggatttccttgggtcgatttgggagacgacactaaagcatgggatggaagcttgcttagcaatactccaataagagaagtactgtatgtgtcaccacgtaatgataaaaacattttcatagttgaaaactatccccaaagaatcgacagacttccttccaattttgtagaagttgtaaacagatataaggacattttattttgtgataaagatattgaaagtattaaaaatgcaagattagttactaggcacataaaattaatagagagactatacgaaatatttgagaaacaagtagataggaccatgttgagcatgcaggaaagaaatgatatccaaaatgaatataaagacttgattgaaaattatggggcagaaattaaatctgttacgagaataattagaagtgaaatcgaatctccatcaatcttgaagaatagtgatttttctaacagaacaattagggaattaatagatcaaggcgaaaggaaaacggaagaaaagttagaaaaaaggagtgaatatcagtaaaatctctgacgaatatttattcaatatctaaatcaggttcgtaagagtggtaacaagagattttcctatctttttgctagcatgagcaaagtctccaggtaatcttcaagtaattctttttaaaaatattgtcatagtaatggattatcgcatcataattacacgtcatttaataacaattagtttaattatcccttcatttaccttcttaatcttttaaatatttttagattttagaaagaagaagaaggtcagtccagtgtctttttatctatcttcaaattcaattatggccttgctagattgtaccttattactttcaagaaaaaatagggtgtgctctacagtacgtgattttaaatttaatgaaaccgaacctatgttattatttgctaacacgggagcagtaccatgacctgttggtgtcacaagcattctagactccctccaatttggaaatcgctcagcagccctcgcctccttatcaataaaataacgattaatcaaacttttatagatagtcttaatcttaataggaaatgacacatcttttccatgttttgaataatctggattttctttattggatctgttatcttcctttaattcttttgatattctatgactattgtaaccagggtcataagatgcgtcaagaaagcctatgcgtgatgacacttttctagttatgatgattttatgtaccaaatttagaatcattattgctaactttctctttttcaagctgttacttcgcaaaggactagcagtcaattgagcaaatgataaagaagacaatatcgggacattatttcccaaatcaaaagcaaattgatttgtatgatttcctgccgtggatagatcaaatcttgctttcatcgtaaaagcataatgaacatctcctgataaaataacgcaataatcagggctaaacgtagtagacacaaaagccaagaattttatgaatcccgcttcattagctctccatgtttcaaggtcccacttataagttcctgaaatggaggtcagaaatcgctgtacgctttcggcatgttcaaaaccaaaaactggtgtcggggatacaatcactagggggtcacctcgtttatatccagagttataaacttcagatttgatgtattctaagacctcatcatttaataatattggaggaccatcgggatttacaaattctctctgtgttctgcaatctagaaatatggaaagcgggtatgtaggagcaacgtatgtccactttttaatatcccaaatcctatcttccactattcgtgttttattgatttcattggctacacgatcgccatacaaaatagaattttttgaagccgtgtcataagggaacaaacttttttgtttttttagatcaaggtacattttgattgtatcaacaaagtcatcatcaaacgaatttggatcgttcccccaagcttgaaaagcccaataagctacaagaccattggcaattatttgagatccgctcctactgtttctcacagagtcgctccatttccgatctatgttccaatcgtcagttatttcatgatcatcacagatcatataagtaggcacgttagcaagaagtcttctaatttttctaagatctttgcgactttcttcaagatccttcaattctgtttcatacttttgtttagattcggtagtatgatgtaattttcctagattggaattaaattctttgggccatattaatggattccatgaaactaaatacattgcagcgaattcaccaaatcctagtaagtgattctcagatacttccgaagtaaattgggctttggaacttacgatttccttgcggccaccaattggtatgtcttctggacttttgtctactccatcaattatttctcgccatccaagaagctcgtttgataatcttcctagatatcctattagaggtccagctacgtcatctgcgtaaatttgatcgcctattagaaagagtgagctcggtcttttttttagatcagagatggaagaggcaagaagtttatcacctataatcaaactatccccatcatcaccgtgcagttttctacatgaaccatagagaatatttaggtgagaactatttttcccatcagggatatagagtgttggtaaggagaacaaagaaggtaatagtaagtcttgatttacgtcgtgattgttcagttcttctggattaggactatcataaagtatagtactttcccccgataacaatcccagatcctttaggcgcagtccttgttctttactctcgctagataaaaaaagctcaacatcatatgctaggatctcgtctgtgggaaaagtgcacaatatgtttgttttattatctatattatattcattataaggaaatggtctagcaattataaggctcacatataggttatctcccagtttcagtgaagtacatttaccactacctataatatgcatattagctcgagagaagagtggtacgagttctttatcagtatgttcattaactgttttgcttagaaaaaagttactttttgacctatagaaattgaatatttctacttttgcatttacggctttgctcgttgctatccagatacacacttgtgttttgtcaactcgacgtataatgggtcccgccagtagtaaaggcaaagcagatttaatcatccgaattcgatccggttatttattttttaatagcccaaatatggtctcaatagtatttattaagattgataatgaagtcatatacattttacaatattaactgttaattctttataaaaagttattatccaaaataaactaatgatatttcatcaggattttctttacagtttcgtcacttacttgatcaaagtctctgtaaaattgaccgacggcagaaaaagtctcttccatatgcagaattacaacatggtcagctattttagcaagcttattcacagtttcatctctggcgggtgctacaggtactgcaacaacaagttgtttgcaatgacaattattctttacccattctgctgaggcgattatggtagatcctgtagctattccatcatcaacaaggacaataactttcccctcaaatttatcatgataggaaatatcgcctctaaattctatcagccttctcctgatttccattttttggaaatctatttcctttcttaaataagcttgggaaatattgaaaaggcgtgtaattccctcattcaaaaagtagcttccgtctggcatcattgcgcccattgcgaattcttcattgaattcagcccttatctttctagaaacgattacatccaaattacaatggaaattgtttgctattatattacctaatatgataccgcctcgtggtatcgctaaaacaattaactcatttacagcattagataaatctatttgattttttttcagaatgactgccaattcttttgctagctcatgtcctgcctgctcgcgatcctgaaacaagacgctcataatagtacatatacagttccagtattaaactgaaacaaaatgatttggaacatttcgcggccgttgtcttaacacatgtattttttaatatttcaggtaattcaaatcataatctagatgctataatgtagttaaaatcattgttatgtttcgaataaatttcatgtagggaatgaaccaaatcgtacattctccaagtcttatttacgaattaagttgtacattcatcaaacgtacatcattaggtccaacatagcaccaagagaacatactaatttatgatatattgtaagaagacatgagtaatatttatgaccttgagtctgtattgttaaatctggataagaaagacaattcaacttatttcttagatttcttgtacaataatagttttgaagtcggggtgcttaggctcaatccaggccaaaaggacacacagggacctcatcccgaagatgaactctatattgttatggaaggaaaaggatatatcaacatggtagaaaacaatcatgaaataagaaaaggttcttgtatttttgttccatcaaaaacaaagcattatttccatggaaacaaggaacaactagtagtcttgtacatttttaatgtttcaaaaaaatgaaaattccgtcaacattttggtaaaaaaaataattcttaataattcactcaaacagatatctggagaataatatattgagacttaaagccaacaataggttttacaaactttgaattttcattatttgtatgccctattttaggatcataacacctcatataatgtaataacaagtctgtatgttgctaggaaatctcgatagtaatttaactgttatttaatctggtgacatcatatcggcaatccgtgtcaccctatcctccggattatattgattaactacctcagacaatggcattctttttcccccaactatcttgatatctatatcgattttgccatcctcccctacatctataatgttatatgtatcctcaaaaatccctctatatctccatgagcaggctgtaccggcataggctatcttcattgtacctagattccaaatccaaggtctgtgtttgtgaccgcagataacaatatcaacatcattagctagacaggtccttaaaacatcgcctgcatcggatattcctactacgtttgtatagccggtatctggtatggaaatcaagtgatggtgcatagcaacaatctttattattgtcttatacttatcttgaggtttttgtgtttgttgtttcggattagtagaaggtctcggaatatgatatttttttagaatcttgtttaaccatagattttgtctatatccaacttcaccctcatctctatctgctcttgcagttccaactgtagtaactattactgtttggttcttgttctttggattattatacttgtaaaccctcgaaccacttggcgcagaaactggaaagaattgtctaaataaaagatagccagtgtgcctataatcatggtttcctggaaaaattattagattcttgcatgagaatttttttatttcgtgctgtgcctgttcgaactgaaaaaatagtccgtcatcagttaaatctcctgaaataataatgacatcaggtcttaattcattatttacctcatttactaaagtatcaaaaacattttttttaaataaaccaccaatatgtaagtcagatatttgaacaaatctcatatagtattatcttaattaataatttaaaagcaaacattaaatactttcacaatgaaagcgatctgaattaaattcttcaaattgattgactcatccccatacacataatactacaaattcagccgatgcattctagtcaagtcaatgtcatggttttttgaatgtaggttttggtatagcaattttgataggatgtctaaaggcaggatgtaccaaaataaactcacctttgtgtaatttgctaataactgatttggtagcatcgtctaccattgaataagaatttgaagcaagttcggacaaacccaacttggtgataacatgtaaaccagtattttcgttaatgctctgatcaatttgactcttgaattgttgagcggagaaaagtatgcaatgtctggacttgcctgtgattaaggtttttaataattcttcggcaacagccgaagaattagacattgatattccgagacccgtattacccgattccccccgtggtaaaaatctattaatttcgtcgataaagattacaatgtattttggttttttggtcaactctgtttttgtcctctgtttttcatcatcagtttcaacaacaccatcatcacttttaccctcataatcgtcagcaggagtatttacatggccaagggagtacatctcgtttatcgttttcattacatctccaactacaaatgcttgttcgtctaatgtaggcagcatagctatatctatcacaaacacttcatttttcttcatttttttaatttcattaccaagatatctgcttgttacctttttatctacaaatagagttgatggttttctatatttttgcatcatcccctgaaactttaacaatgtgtttttatgagtaacgatttctccaggaaattcactaaaattaatcaggtccgtccaggttgcaagcttgtgaggacttgccttatcatcaccctcttggctcaagttgggccataattcataaatgtaatttaggattgaggaaatattgtgttgaggatctagagttgtttcagaggaaaataacaattccaagcaatcataaacatctgataattcaaaagaatatgtgaaatagtttttctcaggaatatatgcagaatttggtttaccatcttttccccttgggagaaaatattttacattgttaaacggtgttaaattcaaacccagtatatccagttcatttttatcctcaatagtataggctccatctctttctttatctatgtataaaagattctttttctttggtattaaataaaattatagaaataccttcttccgatagtttttggtgaaggacctgtaacaaaaataggaggtagccagtcttcatgttccctgagattcctgtggcgttaacatgagtagtatcaggcccaaaaatgtacgttacatctagatctatgggtattttagcattgttagtcatcgaaattactcctgcaggaataggatgttccatatctggaattccaagagatgaaatgacttcttcggcagttgcaaaagtaacaagttttccttcttgaacgggcatgttaatgctccaattttttggttttagtgatattttattgagacttgaagtatttgaagaaaagtcctcttgaatcgtgtgaaattgacgattggcaatcacatcaacctttgccactgtcatgccatcacccaccttctcctcagtatttaaaagtggatcaaactgagatgaatattgatttttagaaatagtttccctatctatatagatcctcttgagttctttaaccattccaatagttttggtgctttgaacattatccacactaataaagtcaaaaggatttatcaggatttcgggtttgactatgatccaaaaggaatctatggaatttgaaaaattttcagatacgaaggtaattccgatgggtttggtatcttgcatctatgatatcttaatctacaaaggttataagaaaccaagtatcaatttgtatccctatccagttgtctttacaaataatatatcttaattatcctctttttgcaaatatcgaaaatgtcatgaaaataaactaacttgcaagatttttctgactttacatcgataaaggttcacaataaaagacaattagacgatgacacccaaccaaattgtatattagtaaaatatctaaagacatgtattttatgttaacaaatgaaattgattacacatatacggacacccgactaattcgattgtaccagttttgcatgtaaaagaatttaccaaagcagaaacgttgaaatttcgctgtcagatttttttaaagatataattaaattttagcacctggaaattttcctatttgattgtagttactaacattaacatatatgatagcatacccacatgatagattgacaaataattcaagaatatggatagtaataacagtcataccgctagcaataatgatagtaatttttggaattcttgtttatcagattaatagtatttcagtcacactaaacacagtattagaacaagattctccctcctataagacaaaaactctagacagttcaagcttcctgcatgtggaagaaaacagtagtaacattagtacaaacgataatagtatttcagaacaactaatgctaaataacgtgtcatccgcaacgtcatctgagtcacaggaatctgggactgacggtagtggacagagtgcggactctagtacctcaccttacaaagtaatatatgacgctttaattccagacccatcttctattttatctgtaatcataagaactgcaataatcgccactttggtttttgttatagtaaaatggcttggcggaaaagggatcggccagttatctccttttggattattaatcgtagttggattgggatcagcgattggcgatcctatgatttataaagaaatatctatcccacaggctatggctgccgtcataattgcagttatattctttaaagtaattgactatatgactttaaagagtaggcgatttagagaatccatagaacctaaaccaatcttgttagtagaacatggatcaattgtcaatgccggtctaaagaaagccaaaatggataaagcagaatttgaggccgaaatgagattaaacggtttagaggatgcaagtgaaattaagtacgcccgattggaatcgaacggtaagataagcttcataatgaaaaagaaatagacatcagatggaaataaagacgactaattaagatatgaattggttttttttctacagctaaatatatcaccatagttgatatataacagaggtaacaatagtgaatctttatggcagtaccacttttaggaagatggtatcaatccataaaattgtagctattcttcaaagcttatgctcttgttaataaaattgtcaattgcaacctgatgcattgttttataggtatcatggtagctaaacaggagagcagcaaatgcatcaatttattagaaatattgcagagaaacgtagattttttggataagattgatagaattagcaaattttcaagaatatccaatttaccatcttgcttaatttatataattcattctcatttttagattattgaacagcagtgacgacataaaatacgtagtagtagtaagaaaagatcttggaatgggtgtcggaaaaattgctggccaagtaggacatgcatgtagttctgtagtgtggcaaaacccagaccatgtagctaattggtttaattacgggggtcaaaaaaaagcagtattaaagatccaatcggaaagagaactaattgacataataaaaaaggctcaagcatatggtatcattactacagtgatcagagatgctggaaaaactcagatagaacctaacaccttgacatgttgcgggtttggtccagattattcaacaaaattggataaattgactgggcatttaaagttactatagtggtaacatagggttattagaaaatgaatttggttctctatttaaaaggaatctttttgggacaaattccatgaaccagcaaaaatattttattgtcaagatacaaaaattgatgtttatttcaaaaattgaaatcttagaaaggaaagaagacgaatataacaaaaatactcttgaaagggatgtagaattactccagggtgttacaatgtctaacttttttattcaataaacctatttgatgataatggcgtgatatgacaaatgcacatgacgaattctagtcgcactttttattacctaggtttatctgtgctattttcgacaatattaggtttattattcccaaatataggaatcctggtggaaccttacttgttattgtggcttggactcttacttttgtttaatctaatcaatataaatctgtcagaactttatacagtgttttcccatccgaagaatctgataatactcacaatagtgaaactagtgttattgccggtcggtttatacgcaataatgaacctgttttcacttaccattgttccaataaattcaaacttaatgttgtcagtgtttttattatcgggcatatcaacaggactaggatcaccctttgttgtaaactttgttggaggcagattaccaatagtggtaggattaataatagcgacttcattaactgttccatttttgttacctattttaatatttctattttttagtagcaactttgcaattcctattttcgacatgatagtacttctattagtagctttaatgctgcctttgatagctagtcagcttttaaaaaagatttcccctaaactcacggacctaatcaataaacaatcactaaacctctcacttgttttcatttttctaatcaatctaggggtttttgccaaatattcttatttctttttttccaattccctcgtaactgtagaaaatatcatcttagcgtttatattatttggttattacggattgacaggttatagcatctcgaggctgatgcgcctatcaaaggatgatagaatatcaacaatgatttcaatgatatacattaacaatattttgatagtggtgtttgctcaacaattctttggaactgaggtcgctgcgttagctgcatttttcaatattccttactatgtggggatcctactattaaaaaaaactttcaaggcaaaataaattcttgctattaccttttttttaaaatatcttaggaaagggttacaagtgttgttcgagttttaacggagttaaatcccatgtaccaaaactactcacattgtgtcctttttgtaaaatggatttcaagaaatttggttattgatcatcttagcctgttattaggatgtaaattcaaaatatctttgttcttgattgtgtgggaccaaaaatctgtttttactttctgtaatgtactgcataagaattttgtattgttgaattcaaatccttgttaaattgattgctaatcaaaccaccatataccaccaagtctcttgcaaaactttcaagtctactgagcaattgagcgtttatgatctcgcggtccgcattaaaatcctgatttgagtttatagatatcccatatggtaaactccaaccgtagcattgccttatagcagttctcatctgatccattacagtcaatcctttttcatgcgaggagcaaaggtacccaaatgtctttccggcaaactctgcccaaaagtaatccaaaaagtttttcaatgatcctgccattgaaccatggtagtctggtgttgcaagaacaatagcatcagcccagttaaccaattcaacggcttgtttaatgccacctaatttttcattgtattctgcagtatacatgggcaaaggatttgaatagagattcaataatctagaatctgcgccatttttgttaactttgtttaatataatcttcaaagtttcagtgctaaaagaatctcgcctcatactagatccgacacctagaacccttaagctcatctctagtaactaccacctatatttatcaaaaaaggattatttattttattcacacataatattcgttatggtaatttataaatataatagtttacaaattatatatattaaattcacagatgttatatgggtaactaaaacaaaaactagagatactggctcttttctttaatcaagaacttacaaattgaatctcctttggctgctctatgagtgacttctactttagcatccagtacatgttcgaataattccgtttcaatggagcaagcctcccaatgcttttctgctatcattattattggacaattgtactccagtagagtatgagaattgcgttttctgtcttttttggattcggcgatataaccttcttcatccctaatccttgctaattctttaactttttcattgaatttcatatctttcatacgaatactatatttttctaataactccttttgacgctcccgcaataccgactctactgcatccttacccatttttttttctacatagtccaaagcatgtgttgctatttcaccgtaagattttggaaatgcagttttaccagtacttgttaatgaatattgcattgtaggtctccccacgccttttcgaatttccacgctttcaaccaaccctctatcttgtaagtcactcaaatgcttgtgtacagccattctagaaatcttcataacttttgacaagtcctttaatcctgcttgcttcatgactttaagataatacagtatttttctttttggatcagattgtgaaaaggtttcagatttcatttcattataattcctcattagatttcataggataattgaatagagcattcctaattaatatacaatttggtttaataattaaattaggttcttaatgtatttactttacctactaggttaagaattaatagataaccaaaggttttttatctagagccaagagaaaaaagatgagaaccattcaaactttggctccaaattagacctttactgccaaataaatataaagtaccaaagtttaaaaatggttcaaaataacaaattataggttgattataaaaaaacctcacctagctatagtaggtttgacaatcattacgattattctaatatattactattactatgagatagttgtattgagagagaagcaaccagagcctcaaaaagtaatcactcctgagggcaaagatatttttggagttgaggagatctatcccacagcaaaagaaggaagagagtggtttattgacatgcaagatccacttagtgacgagtccttctcaattacatctgatgttcccatagttaagaattcagaagacggcttatcctggtcaatcaatgatactcagataagaatgaatgtaaatactccagctaatgcacaaccatggaaaaatattgagatgacgggttatgtcaagataaagtcagtttatgacaccaatcaagaaaatgaaggaggaaccgataatggggactcggagtctttgtctcccgactttacatggcgtgcacgggggggctcacataataatgaaaatccttgtgagggaaccgcattaaacggaggaattgacgttgtaaacatggaggcagcttggaagaaagaaatctggcataccggcggatacaccgattctagaggttccgctaaggcaactgagaatcctctgttagatagatggatcggatggaagataataatttacaaccaggataatgatagtagtgtcaaaatggaatcttttattgatgataataatgataatgtatggaagaaggttaacgagattactgatgatggtggctggtttgccaatagttcagataaagaatttagcagtgcaaattgcaataaacccaaggactacatcctaactaattcaggaccaatagcaagtttcagagcagacaacgttgcttttgattttaagaatcttagtatcagagaaattcaacctgtctgaattaatctaaaactaacaatttttttgtcttatgggaaaacatgacactcgttttcagtaattagtggtcctgcagacaaacatattgattgagtattagatacttttcatgtattgttttgtatcagccttcagatccctctccaactttcggggtaaaaagattagacttgttagatcaaggtagaatatgccgatttccagcaactgacgactgaaattttcatttgatttttaaacggacgtagaataacctatcgacggtatggttcgcagagcatagaacccaaatatgaaaaacttaaccaaggttaacatttattaacctggttaagtaatatagattatgcaaaattttaggcgactggcattgccccttttttcaattgtatttgtaattacggtagctttgattatgtctacctacctgcttaacccattaaatccatcttttgatacccatgctcaaaactcggccgacgacaggaaaatgatcggaactcatactccaggctatcctgtgttcagatcaactggagacatactagatccaatttctattcctggcaactcaaaaaatgcagtagtagatccgaatcaatatttacgtgatttcaattatggacacgtatcgaaatatccaaatggaaccacactaagggaatacacactaattgcttcggattcggaaataaaagaagtgtcaccaggggttttttacaatgtatggacgtacaatggcacaatacctggcccgacaattcgagctacggaaggtgatcacttaaagatcaatttcataaataacggttcaaaacctcattcactgcacacccacggaattcatccagcagagatggacggggtttttgacatgattggcccaaagggcaagttcacgtatgaatttacggctgaaccatttggcgtttatccataccattgtcacatgacacctctggaagaacatataacacacggactatatggtgtgatgattattgatccaaagactccaagacctcaggcagatgaaatggtcatggttatgaatgggtatgataccgactttgacacggaaaataacttttacactgtaaatggaattccatatttctatatgcacgatccaatagagatcaaaaaggatgagctaacaagaatttatctagtcaatatgctagagtttgatcaaataaacaactttcatttgcacgctaacatgtttaactattatccaagtggaaccagtcaaactcctacggagctaaatgacatcgtaactatgagtcaaggagaaagaggtatcttagaattcaagtataaatacccaggaaattacatgttccacgctcataaaacagaatttgcagaaaagggttggatgggtctgttcaaagtgatagataacagccaagacgataaaaatgacactgatctgaggagctatattgcagataaccccaataatgcatctattcccaacaataagtcctatctcgtatcagattctagtcagaatggtgtaaagaatacggatttagaaaataacaatatggtatataaccacacttcctatgagcttaataacaactcactccatagcaaccaacaacatactaacaatccagatgatgtaatttcattctatcagtacggtgcaaactccagccaggccaaggagcaactagataatgaaagataagaaattagaaaaagcagcaaaggatgaagaattagggatgaacgaggaaaataaaacatccaccaacactattgacagtatcaaaggacaaagtcaaggtaaaccagatattatagatgcagaagagccaaccactattggtatcaacatagataatgcaaacacaaaagcatccaaaggaaaaagaagaaaaattggttcattagttctggccgttacaccgctgatcatcctagcaggtatgatttattttctttctagtccatatggtcaaaacttgataaacactggtgttcccctaccagaagtaactatagaaaaagtagaatttcatcagaatcaagtggtggcttttatccgcaatacgggtcccgagcaagttacgatttctcaagcagacattaatgataggatacaatctgctgcgattgaaccctctcaggtattgccaaggctttcagaagctaaagtcataataccttttttttggaacacagcagaaccttatgaagtaggcataactacttcggacgggacaagattcagcaagctcatcgaggctgctgctcctgctccaattccaaacatcaatcagttctcagtatttgcgatgttgggaatattcgtaggtgtgataccagtactaattggacttgcatggtatccgtttctgaggaaaataacaagaaatcaatataatttctttctgagtttgaccgcaggtttgctggtattcttgggtattgatgcatttttagaaagtaacgaaatagctgcgaataatttagctgcaacatttaatggccaacttttaataccagtcataatcatagcgactttcctcggactattttatctctcagaatatttcggcaagagagcagagtcaaagttatcttatgaatatgaaaaagaggagaaagtgcaaaatgaaacaaatcatttgagcgctcaaaataattctctaaaatccccagtcaaacctctgtctaaaacaacagtttcttcaatatccctgacaaatcggctttcaaatgatacagtaggtctagcacaaaaagaacaagaggataaggagaagaagaagaaaagagaagaagaagaaaaactgacccgattgattgataagcgtgaaatcatcaagccacttactctatctctaatggttgcaataggaattggtctacataatttcggagagggcttggcaataggggcagcagttttactgggtgaaattgcacttagcacctttttgatcatcggctttacaatacataatacaacagaaggactggctatcgttgcaccccttgcaaaaacagggaagttaatgataagacgattaattgcaatgggacttattgcaggagttcctactattttaggtacatggattggcggatttgtatattccccattagcttcaatcatatttttgtcggttggagcaggtgcaatatttcaggttgtttatgccctcgcagtctggatgagtaaatcattaaggcagagtagtaagactgacaacgccaaaagtggggattttggagaaaaaactgctagatccggaatgaaaatactagcttcccaggagaaaagtcctagcgcggcaataatagcaggctttatcataggattgctaataatgtacataacaggattgttggtgtagtgtgatggccttgcaaagttttttatcaaaccttggtttctatataaataactaggtgaactagagtgtcaaataatacttcatcttttggggaaaacacaataatcgactccattaaaaaggtcaatagttcacagagaaaggaacgtacagataggatggaagactatcttgagattatttacgaactagtccaacaaaaaggatatgctaccagtgttgatattaccgaatgtttgaatgtctcggcccctagtgttaccaagatgatgagaagactagataccacaggatatttagaatatgaaaaatacagaggtgttcgattaacccaacaagggacaaatgtcgctcaaaatattagaagaaagcatgaattattgacagagttttttactttcataggtgtgagagaggatattgcaaactcagatgccgagggcatagagcatcacctacattccgaaacgctagaaagactagaagaatttcttaatgcaaatagaaaaaagcaaaaataagggaaaagaaccttataaaatttgtgaattgtaataatctcagaatccccatactacctattttagtagattaattgaaaatacaacaaaattgaaaaattaattatcttctacgtgtcatcaattcttaattgatcagttatgtagctatgaccaatgaagatgagttaatccgaaatttggtaaatagattcaatggtttggaggtatcgactataaaaataaacagattttacaacttaggaaaaagattgcttttgaatggtgagtgaaaccctcaagtaggtccagagataagtctttgatgataattttagaaaaaatgattaaatgattttgagaatcaatccgatgaaccgaacataatgttgatgtgcttgagagcataaaatcagaataatttctcagactttgaaaaatataaaaatgaaggatcatcattaagaaagactatccctatgaatttgaaccatgttccatgataaaagaatggataagtaattaaaaatcatatttttttataacaattcaagattctagacatatcactattctttcgcttttttctttgttcaaagatagttttccaattaaaagaataattttttgtaacgtctgttatctcagcatttgaaaacgctagcacgtattgatattttttattccaatttttttcataataattaggatggtttattgaaatgggatattcaagagttgaatccacatgaatccatttaccttcaataaaagcttcgttccaacagtgatcgagaaaatcatgaactattctagattgtaccgacaaagaactaagtatagccccaaatagaaacgtccattcactgcatctaccgactcgattaaaagctatattttctatttcgccatatcgagggaataccactgtaaatgaacatttagggcattcatgatattctacacctcttactatccaggaattgttttttacatatctgagattcaatgataagttgcatgatggacatagtggactcttgtccatccatttcataaaatcctgtttaaaccaattaagcagcaatgccataggtatcatcaagtttacgtttccatcgactgccatatcaaattcggttctaatcttgactggcactaacatcctgatggattcaagtagagccttatccaaatattgcttgctcacttgcttatacaaaataagaatgtcctttgtgagtggataaggaaggccattatttgctaaatcaaaaatgtttagcactagttaatcaccaaacaatcatttaaaaatcaagtgctcctatgcaaagcctttccattatgaatcatctaagagttgttgatatgtgcaagggtttagatgaatggaggtcaccgacaagcaaagggttgaaaagtaaactagaaaggtcagccccccaaacaaacactaaacgaccacattttcaaaatcttagttcgttctaatttcaatagacttatgtttgaataagcgcttactggtaaatgacaaaagaaataagatatgatacaatttaataaaaattctgttgaaagggaaaaaaaagagtcagaaaaaaaaaggtttgcatttcctgggagtaaaatccacgctattcccttcctgtcctacaccattgagcatatgtcattaaagataaagccagatcttgtgaacaatgttattattgattgcgaacagcaaataacgataagagcttttaatgatttatcagaaatcgtgttagatatttctgatttaaaagttacaaaggtaaattcacagtctatcaatatttcaaaatttagatgtgttgataacaaacaagttgttatagaatttttagaacaatttagagccggaagtatcatcattatagatatttcatattctgccggctataccactattgaaggcaaagaagaatttggtcctccaaaaactgggtttcactttattacgaagggtaatcaagataaacaagctccatcgtaccaagcttggacacaaggcgaagcagttgaatcacgctactggtttccgtctattgatacacctcaagtcaaatttactttggagatcgaaatttccgcaccacaagggtatatggtaatttcaaatggacaattagaatcaaaagttatgaaagatgaatatgtaatttggaagtatgttgaaaagaaaccccttccttcttatcttgtttcggttgtggtaggcacgttttcacaatatgaatcaaaatatagagacgtttccctctactattactggccagaggaaatcaaggaagaagatgccatgttaactttttctgagactccgcaaatgttaaaattctttgaagaatatttcgaaactaattacccttttcaaaaatactcacagacagcggttgataattttgagtttggaggtatggaaaatgccacctgcactaccttgactagaagagttttgcatgataagacagcttctagagactatagaaatgatatcttcttggtggttcacgagcttgcacatcaatggtttggagatatggttacttgcaaggattggcctcatatctggttaaatgaaggatttgctacttattgtgaatctttgtattgggaaaattctcggggaatagatgaattccactataacttgatagaagctacagatatttattttgatgaatcaaataaactctatgacagaccaattgttactaatatatataaacatgtagacgatttgtttgatgcccattcatatgaaaaatcaggttttatcctccatatgattcgaaatcatataggagagcagaattttagaaaatcacttaaagtctatttggaaaaatacaagaatagatcggctgattcacttgacctactcaaagtacttgaggaagtctcaggtagagaaatggcatcattttttgatcaatggatttacagagaaggtcatcctaaattggaaattgagtacaccctgacgcgtaataatttaatagagaaagatagtataaattctcaaaagttaaaaatcaaaactctacagaaaaacaattatgaaagcgatgaaggtatctctagatattatcaatttcaattggaatttaaaataaatatcgtagataaatcgggacaaaaaagccacctggcgcatataatgaatgtggataataatgattcagagttgtttgttgagttagacaataattcaaatatcgaatccatatccattgatccagagtttaagattctaaaagaaataagttccattaaagtagtaaatgaaaccagagactttcaattaaaaaaactgctttataatcagataaaatatggagaaaccattatagaaagaattaacgccataagattacttaagaatcaatattcagaagatggaattagagcattatacgatactattattcaggacaaattttacggagtagccattgaggctactaatacaattggttctttttatgataaaaatgattatgaaaagtctgataattcatatcagtgtttagtttcaatattaaataataaatcaacctttgatgctttacgatcagagaccaaaaaagcaattataagaaatattgggacatttgaaagagttgaatcaattagtctgcttaaagatctaattcacaaatccgatgacgaaagtaattttgtaaaatcctccgccgcaacggcactaggaaaaagcagcaaggacttagagtcgatagagaataaagtccaagtaatttcccttttaaaaaacctggttgaaggaacagatacctttcaaagcgttttagccactggggctctggaaggactaagagagttagcaacggatagagattacaagataaacattgaggtagcacatttttttctagagaatacactcgaatcaaaggactactttattagagcaaaagcgacatcaaatttggccaagtttttaatcaacaataaagacacagcaaacgccgacaccagtgctatgaaccaggcggtctttaacagacttaaggatttgttaagagatgacagacgaaagataaagataaatgcatgttctgcactggcaaataaagacggtaaatttcacactataccggataagagaacgtatgaaactattgaagtacttatagatgtcgcaaaaaatgatttagatggatttgtcagaagaaaggctgaacacagtgcaaatatcgtgagagaatggatacatacatgggcaagcaaacccttgttaattaattctgaatcaaaatccatttcatgaacatgtcaacgtctggtaaggattcgtaatatatttacttaaaataggacctaggtcaataattagggcaagcaatgtggtatagacgtgattatgtaaaaaagaagttccttaaatctttatattttcctaatattattttcctataatgattgaatcagaagctaaatgtacaatgttaagtgattcattaagaagaatagctttgtttcttgttattagtagtatttctttggcttcttttatgataatagagtcagtttcagccgtatcatccacctttggtcaaactggttccttagaagcaaacagttctagctcaaatctatcaaccatggatgactacgatgtacatggtagtccattttatactgaaaatactaaatcaacaaacattaaagtatcaagtattgatcccattccaaccgttgaagttacttatactggtaacagtactattggtggagcaccaacccaaactataggtacaataatagataagatgaataatgatgggacggtttcctctaaaggtcaagcgataatattgacagcatcaggtcaagtcataacttacagatcagaatcaataggtaactacaatcctgatggcagtttctcagatagtggtataatggtcttccaattgcctttcaaaactaattccgcaaattctacaagcttatcctcgaattcaacagactcactcaatggacaatttgataatctatttggcatttacaagaaaacagtagacccagagggaaatggtcttaccaaattctggaaatggagatagaaaactttcttgatgagttaaggaagggttatcacctatctttattaataaattagtaattttattcatcaataaactaataaccggtatttataaaagaaatgaaacctaataatttacacaggttggtgcttttcctatcgcaaataaatccatagttgtaatatgtgaaaaaccttctgttgcaaaacgaattgcacaagcactcagtacagattatcatcatcacaataattattcagacaaatctttagaccaagaacaaaaaaatagattaccaccttcaccttcacctacgtcttcacctacatcttccacattatttaccactattagggggatgaatggtcaaaactatactatctgtcatgcattaggacatctatacgggctgtcggattctaataagggacctggaaaagtattcccagttcttgatccaacatggttaccattatccacgctaaaaagtaaagggtcaggttcaaaatttttggctttcaagattgacaaaatattaagggaaatttctcaaatatctaaaaatgctgcaggctttatccatgcctgcgattatgaccaagaaggagaagtcattgggtacaacatactagagcacgcgtgtaacaacaaatactctatttcaaagcgagccaaattttcatcacttacagatgaagaaataatacaatcatttaacaatttgttacctcccaatgaaaagctaaaggatgcagggacatcccgacatatgatagatttcatttatggaataaatctttcaagagcccttaccaattccgttagtaagaaagattcatcagaagaaaagaaggatggttatgtacaattatcgataggcagagtccagggtcccacactcgcatttgttgtcgaaagggaaaaggaaattgaaaatcacatatttgaaccctattggaatgttacagcggattttgtaaagagtaatcagatcatcaaaacatattattatcctcaaaaaatcgattcaaagtcaactgccgaaaacattatcaactcttgcaagaatcaactcggtaaagtaacagacattaatattcaaaaaacatcaataaagcctccaattccttttaaccttggagaccttcaaaaagaagcctatagactttttaggtttaccccaagcttcacactttcaatcgctgaaaaattatacctggctgcccttatttcatatccaagaacatcaagccaaaagttgcctccttcaattaattatgaaaaaatcatcaaagcagtttcaaaacaagataataatttgcatcaaaataattcatatggtaacaaaactaaatcaattctttcttattctgagatctcttttaaattgttagccaacaaggcccttaaaccaaatgaaggaaaagagactgatcctgcacaccccgctatatatccaacaggccaaaaaccaaaacaaaatcttcaagatacagaattaaagctgttagatctgataatcaggagatttttctcttcatttggaaaggaggcctcttctagtcaaactactatcacaataacagtcaaagaaaaatatacttttaaggcagaggagaaaaaaattgtatttgaaggatggattcaatactatagaccctattttgatttatcaagctttgtaaatttggactcactatcgtttctgaaaacaaacgatattttgaaaaatgtaaaaatagatctgttagaaaaatttacccaacctcctcccagatacaatcaatcaacattgttacaaaaaatggaaagggaaaaaataggtaccaaagccaccagatctgaaataatcagtacgttgtttaagagaaactatattacgaattttgtaccctctgctgctgccgctactgctaccaagcaatccgttacctatgcttcaaaagtatcgaaaggcgttcctatttccaataataaaaaggaagaaacaaacaaacttgaatatgcaggtatccaaaaatcaggattaagacctacagaaattggaatagcaataataagttctatgaagaaatacatacctaacattgtttcaacgagtctaacacgagacatggaaacacagttagaacaaattgaatcaggcaatactacaagtgtacaagtggtcgaaaaggcaagaaatcaaattaaagatgcaatacaatcttttaatttcaatgaaagtaaaattggccaagaaatatctttagcctttgaatcaaatagaacaacaagcccatcgcgaaaacctactgccctagctacgttaggcacttgccctgtttgcaagagtggaaatttaatgatcaaaaaggcgttaaaatcaaaaaaaagatttgcaggctgtacaaactattcatcaacaaaatgcttggctacatccccattacctcaaaaaggtacaataaaaagtactggcaaaaaatgtgaaaaatgtagttggcctatcatcaccgctagtggttataatcaaggaaaaagataccaatgggagttttgtattaattcacaatgtcttttgaaaatcccaagcaatagcaacaagaaaaatactacttgaaaacaaatctgattggccccatatgaatacaggatacccattcagcttggacatagggcagttttgtcggtgtcgactaagggcgtttcaatagtaaattaactcgcaaaatagcggattcgttctactctttttaatattttttccggctcgaatctatcttaccacaaggacagggcagtgtgcatatttcaccacttctgaagcagtacttcctactagcatttttttcaaaccagtacggcccttacttccgattactagcaagtcgacatttttggattcggcgtaatcaactattgttgaggcagctgaagtttcagcttcaataattgcagtttcaaaggttgaacaagttggatcagtagaagtagaaccagctgtgccggtatcattagtaaaagtactggttccttctgaaatcactttatcatttcctgtggtcagtgtcttcctctttcctgcattgtacttttctttaagtgaattcatcaaatcctcaaatttctgacgttctttttctaacttgtcagaaccatatgtcggggctaatacaacacttgaaagtaagtaaggatatttgtaaccgcctaaaatgtgcaaaatgattaatgaagaattatatatattgccgatttcaatagcactttctacggcatccaatgaaggttttgacccatcaaatgcaaccaagatctttgagaacatcaggctttttgtttaaactataacttattttaattatttgcttatttttttactgtcaccccatctgaactgaaataaaagacatgattaggaaataatcatctgtgattatcttcataccgatgagcgaaatagaaaatagacaataagataaggagatactacatcccaaaaaaaaccctgatgcctctgctccgaattcgagcattcaattttgacctcttaaaattacagactaatgcattagtgataaatattggcaagttcactttaaagtacgtgtcttctgtatgtcaagtcaaaattctttgaaattgaaaggaaaaacaaccaagacagacttggtttccaaagtatatgaaaagttacaaaaaaatattctaaaatttaaacaagtttcaaataaaccccttacccttgaagaaaaaattctaataggccaccttgatgaatcaactgattttatgacctttaatggtttaaccccaggaaatggatatatcttgttaaacccagacagagttgcccttcaagacgttacaggacaaacaactattcttcaatttatgcaggcaggtataaaacaggttttggctccaaccacagttcattgcgaccatttgatccaagcaagagtgggcagcgattcagacaccaaagctgcaatttacgaaaataatgaagtgtatcaatttctagaatcttcttcccgaaagtatggaataggattttggaaacctggtgctggaataatacatcaagttgtcctagaaaactatgcatttccaggtggattgatgattggaacagattctcataccccaaatgcaggaggactcggaatgctagcaataggtgtaggcggactagacgcagctgaagtcatggcagggctgccctgggaagttttgtatccaaaaaggatcggcgtatatttaacaggaaaactaagcggttgggcatctcctaaagatatcatcctatttgttgcctcaaagctaaccgtttctggcgggactaatgcaataatagaatactttggaccaggggcaagaaatgttagctgtacaggaaaagccaccattacaaatatgggagcagagataggtgctacctgctctgttttttcatacgatgccaaaatggaatcctatttgatttctactggtcgaaatgacctagcagatattgctaataagaacaaagaattgctgaccctagacccagtcattgaaaaagaaataagccacaatcgagaaaacgcttccaagtatttcgatcagctcattgaaataaacctagatgaactagaaccttacattgttggtccacataccccggatctggccagacccatttcaagaatggctgaagacattcaaaaaaacaactacctagatactatttctgtttccttgataggaagctgtacgaattcatcttacgaggatatgtcccgtgcagctgatatagcaaagcaggcaatagaaaaaggaattaggacaaaaacacctcttcaagttacaccgggctcagaaatgataagagaaacgatagaaagagacggtcagatccaattattaagagatattggagcaaacgtattagcaaatgcatgcggaccctgcattgggcaatggagcaggcctgaaataaaaaaaggagaaccaaatacaatagtcacatcctataacaggaactttcctgggagaaacgatggtagaagggaaaccatgaactttatcggtagtccagaacttgtaatcgccctcgccctgggcggtcgactctcctttaacccattaaaggacgaattagaagcaagcgacggaacaaaattcaaactaaacccccctaaagtagccccagaagtcccaaaagatggctttaaagacacggtcgatatctatgtccctcctgctatagaccctgaaagtgtggcagtggtaatagacaaaaatagtcaaagactccaagcattagagccctttttagaatggaatggaaccgattttatcaaattaccggtattgagcaaggtaaagggaaaatgtacaacagatcatatttctcctgctggtccctggttgatgtatagaggccacctagatagattaagcgacaatttgttactgggcgcagtaaatgcatttagaggcggagaagtaggtaaaggactcaatcttttaaataagaacattgaaaccttttcccatattgcaagagagtacaagcagaatgggttaaaatggataatcattggggataagaattatggcgaaggtagcagccgtgaacatgcggcaatgactccaaggtatttaggatgtgctgcagtaattgcaaaaagttttgccagaatacatgaaacaaatctaaagaaacaagggattcttgcattaacatttgtagaatcatctgactatgagaaaataagagaggacgatagaataagcataattaatttgcgagatcttagacctaaaggagtggtaacttctatcttgtaccataatgatggtactgaagaacaaataccgttaatacactcatacaatgatgctcaactaaagtggtttcgtgctggttctgcccttaacatcctaagatcaaggtaaagaaagagtttgatcaatcctcctctccccctctcctcctctccttgtcctcttccttttattctatctttgccatcaccgtccctttagccatcaccattacagttactaatctttcagataacaacctctcttaaaaaagatcattaaactcttcctcattttactttaccttttcttgctcttttttttctctattattattcatatcccacagaaggtaatgtaacaattaggtttactggctcatacaaaataatcatatatcgagtaaaaacacttttctatctcatcctcaaatcagatacatcaaaaaagcctaatttccctaaataaggaatttcttccttaaattttgaagtatcctttactaagaatccatatctcttaaacgaatgatttgattttatatcctcaattgagaaatgcttttggcgatcgtctaaaaaaacatcaatagttgtatactttataacatcatacacagatgcctttcctataatcgcacccttaactatcttgctttcatcatatcctaaagtcaagcaagcatctttgttaacattttttgaggtgtgtatcaagaatggacctcgaaagttggtattccattttctgatttctatagtctttcttccagttgctagcaaatcagcataaggctgttttaaagaaagacatttcaaatattataaatttttaaattaataatatttaaaccataataaatatttgcaaagctgcttatgccaattttatttttaatttctgaatttagacaggtaaaaaaagattctaacttgcatccaagaaaaagatggtcgcttcttctccagtagaggaactagtaaagaaatttcaaatcatcaaactcaacctgctctcctcttgatgttgattaaatgctaatcgacatctagtattcttggtaagacctttgatgcactttctcttattgaaaaatccatcagtgaagtcatttcagtaacatggggatttatttctaccaacactgcgtggtttttaacagcatgatatggtaaagtattagccggagaaacgtttaatgatgttccaacaacaaacattatgtcacattcagatgataattgaacagcttgattccaagcatcttgaggtaattgctcctcaaaaagtaccacatctggctttaatatattattacaaactagacaaattgggattttttcttcattaaagttatcaaaaaaattaaaataatcatactgttctcttttcccacagactatacaaaacattccaaatatgtttccatgcagctctataacattttgggaaccgcctcgttgatgtagtctatcaatattttgggtaataacatgactccttttgggccttgtgttttcaaatcttccgatggctgtatgagcatcattacattcagcttggcatacaagtctttgtcgtgagtaaaagaaatcccaaaccaattttggatttgaaataaaagcagagtgtgaagcaagttttgctgggtcatactttttccacagcccatccttatccctaaatgtaggaattccactttctcttgaaatcccagctcctgtaaaaaatacgaaattttcggatttttcaattattttctgaatttgagtcgcatcatcatggtattctccgtgaacgccttccatgcttattgtttattcctatggaatttaaattcataaatgtatttagataataaatgtgcttgtacttccctggagacttgcagtaagatatatagtttggccaaaaatagacaatataatcatcatatttcttcaggtgaaactattagacatattagccctagggaacatctattatggagagttttatctagataagaaaatctaaattgataaattgctgatgctattgattttaaggttacgttctcaaaaaagcatagttagttcaaaagatttcaataacatgtattaataacatgagtaacttgtataactacaagtattcatcctttacacggtcctgaaattttgataataattttcctacttttggatcaatcacataactacaatagggtacatccttgttgttatcgtagtaattcacgtgatatttctcagcaggataaaaatttttaaaaggagtgatttcagtgactataggattagagtatactttctttttctcaatatcttcttttactttagttgctgtatccttttgttttggtgtttgataaaaaatggcagatcgatattgcgttcctacatcattgccctgtctattaagtgtagttggatcgtgggtataccaaaatatttcaaaaagtttttctagtggaatgatttttggatcaaatcggatttggatagcttcagcgtgaccagtttcgcctgtacaaacttggtcatatgacggatcagctagaaacccgcctgaatagccaggtaagactgagagaattcctcgaactcgcttaaaaatggcctctgtgcaccaaaagcacccatttgccagagttatctcttcaaaattatcagatttgttcgaattttcggcttggtcattcatatgaatagtctagtggaccaccacctattagatttattcacttgctttggatgctttttatagtcccagggagacgaaataatgacaaatttgaattgatctgatttcataaaggcttaaattctctaaaaaacaaaaggcatttaactatgactttgaatttaagttattttattaattaaactaaaatttttcataatttatagaaaagatacaacataatatcattaaagtcagttactatggttttgcaagattggtcgtatataagtatcagtaatcttgtctagactttagaataataaaaattatcaagaatatttttaattttgattgggagtatcagtatttaactcgggtataaaaaatatgagtgcaaaagatcgtagtaacaatgtgtctaattagaacgtatcaaacttgttagcttattaagactttacaaattgtactaatatgatctattagtaaaattatcaaattattaataataaaatatgatatttaacaaaaaaagatcaattcaatcaataatcaaaccattgtaaacgttattaaatataaagcttatcgcaaacggcttttattcgtttatataatacaagatttatagtatctaaaaaattggtaactagacatactttttccaacggtttttttatcttgtttttcacatttattgtcttttcttttatcatcttttatgcgaatatcaatattttgattgcaggtcccgattctaacattgaaattattgccatggctcaaacaataggtcatgttcaagggaaaaactatgttttactcaatacaaccgataccaagaattgtccagaattttacaataatcctgtacaagataatacctttgaatcttctataaatgccacaatatccgtcccccataatgaaagtgggataggaaatatcaccgaacctgaacctatcgaggattctaagacgatcaccaatatttgtccatttctaaaaataatgtatccatatgattgctccacagaagcaaacagttcatcggaaataatgtgctacacaaaagaagatttaaaacaaactaacgttaaggaggatgaggacaataataaagaggacgaagagcaagtagaagaagaaataccagataatgaaatttttgacaaaaaaggcttattgatagcggatacaaaattcaacaaacaatattcgtacgaattagttgatccgcttaattctgacaagaaaataaaagttaatttggatcttggaaagcacactcaaggacacaacaaacacataaattcacccaggattgaaattgaaagagaaaacatcaacggaagtttagatatgaatgctgcaaagaatcaaatgatagtttggaagggaaatatattgggttattttaaggaaccaaaggataaatttgataatgaaacttatattgagatcatgtttaataccggttttcatgcatctgatgcacccgatatcgaacggagaggaataggagtagtatttgacgtttcaaatagcagtaatccatatattatggattatcgggatgatggtagatacttaaaacttacaatgaatgatgtaaaaaatctagcaggagatgattttatttttcactcaaacgacaataagagcaaagactatttcctaaacgatctcacaaatactaacaatgttactcttaaagtgaaaactttcttgacagaagataacaaacgtgttatagaagcatatatcgatcccggtgcgggaaaagaggtatggtattggactttaaaagacgcctctaaactgcaagatcatgaggaaattagggatagatcgggattcatagaaacagtttatcaaggttcgggatttacctatgtccgaactgataatatagatactcgtcttgcatctctacaatcattcattttgaactaattaagatggttggtgctttttttgagacttactttttaatcctgatttagatatattaaacacaaatcaatatttctttttttgtctatcactgccttattaccaaatcaaagtctccataaatttattgtatttatcataatcagatagtagactgttcttatgttctatgaagtctgattaatggatatatctagtttgcagttattaatagataatacgttatacggctgggatatttgagatcaagcatgcttaatcttagagtagtctagttagacccttcttttcattatgaattatatacaatttgcaattatcctacgaggaaccaatatgacttttaatccacccatctcaaaaagaaaatccggagcaaatgacgaaaaagacctctaggcctgtatttaaccaacaaaaaaaattgtctcaacccccggccccgcccccacctactcaattaatttgggatcttgaactaaggaactaatcattagtatctagttgacaagatcagaggtattattatctatttctaagtttagttaattcctttgcaatagcatcaatggtataggttactgtgaatggctccccgctggtcttgtgaaataccaatgcgttacctgcaaaatttagtgtccctgagcttattccagttccattgatttcaatcggcacatcaaccaaatgtcgaagatgagttattgcaatgctcttatttccaggcaagactgcatgatatggctcaccatgagttgaataggggttttccattggtgcgtaagtatgaaggacctcgacttctatcggtttgcttgctgtgaatgttactgtgcctgaccaaatatagctatcatttcttaatgggagagcaaaaactacttcgtgtgatggctgtcctggatgtcttaccggtgcaggtaccgacattgaagtgttttgaattgttatttcttccaaagctagtaagtttaatgatggtgtatcagtctggggatttgaggtaccatttgaaatagattttgaggaattagacgctaaaatgctattaatgtcattaacaaagctcgaaaaggatccaattgatacgtttccattctccattaaagaaggagtaattgttttattactactgctgccactgtcaccactgctggtgctactgctgaagttatcagacaagtccagctgagcgtacgaaacttgataagaaaaaaatatcatcgcggccataaaaacaattgatgctttgcatgtttttccaaacaaaaaatgatgtctttttttatttgcaatttctaaattcattgtatacctcataaacgatgtacaagaagtaaaaaatctttgctaatctaaaatatcatcattagtgattatctgtggggattttgtcatatttatttctcaatgttcttaaaactctaaaaatgtcaaaaaaatgagttaataaacatcgatagattcaaaaaaagttagaagaattaagacattttaattctatggtatcctcagaaggatagaaaaattaagaatttcaacttttgaccgcatccattaataattctatggattttagatcaaacggatcttgaaatgcaagaaaaaactggttgatacctagatcaacgtattcttgtaccctggcactcacctcaggagaatttcccacaaggcccttctttagtatttgattgtaaacacccggccccctctccgtagcaaaaacttttttcttgtactcgagttcttgttcggtactagcaataagaacatccaattcaatcgacctcttgaccactttattctgtagatctttagattcttggttattttgtgtttttaataatctttcaaatcttttgtttaatgaaaaatattcatgtggagtcaaataggaacattcccatacatctgcataatttgcagcaattttcatcattttatcttttttggctgctatcgttataggaattctaattttaggtttgacaaatgaagcaccccgtattttataaaattgtccatcaaaatttgtcaaagtgctcgctgactggctatattttaaatcatggtttcccagcaattttgatagtaattgaactccttcgttaaacaaagccacacgataaattgcatctgcgtagtcaattccataaggataccaccactgaagagaatattttagacttgcaccagctccggttctaaattcaaggcgtccttttgaaacatcttgaaaagtaattgattgttttacaagtaagaccaagcttctataatctggaagcatatacgtgataacgggaccaagtttaattttattagtaattgggataagtgtggatagaactgtccaacagtcaaggtcaatttcagttaatgactcaccataataaaatccgtaatatccaagctcttcagctaacatacatgtttgcttaattttttcataatctgttccccaaatttccaggcaaaagcgaacatcattcaataaaacaaaatgggatacaatatattaaaacatcacttaaccaattttaaaaatccccaggctttggacatctaggaaatttatcaaagaatgttactaaattttaattactaacattactatttcaggctgcaaatctaaaataagacgaaatcacaaggctggctggatgattgataggttggttatttttcgactacaaaagtgatttttcatgtattactttctttttatggcaatcagactaaccaactttacgttacttcgatcaatataacaaaaaaatagaatcgttttaagattgattcttattcttttttttattcaacatagtggtggtgaatcagctgatcatagaaccttatagacttgatgtttacgaactcaaacattccatgctttgataattctctcccaaatccactatttttgattccaccgaatggaactctaggatctgatacaacaacattattgaccgtaacaattccagcctgtagtaattttgagtatttttccgctttccccaaattttgagtccaaatgcttgctccgaggccaaattttgtatcgtttgctatttccaatgcttcttgttcatcttctaccactattaccggagcaatcggaccaaatgtttcttctcgagctacttccatattaggagtaacatttttcaaaatagttggtttgtagaaatatcctttttcattaccctcattttttctacccaatcgctgcccgcctgttaccaattctgcgccctctttcaaagatctctttaccatttcgtcaatattttctaatgcagaagagtttaccaagggtccgatatcagtttcttctgaaagtggatctccaatttttaatttttctgtcttttcaacaaatttttcaataaattgagaagctacgtttttgacaacaataaagcgtttagatgctatacaactttgtccacagtttatgaaacgtccttttacagcaccacttgacgctttatcaatatctgcatcttcgcatacgatgaatggatcgctaccccctaactctaatactattttttttaattgtgcggttgcatgcttggccacctttgcacccacgggtacactaccagtaaaagtaactgcactaacatcatcagagtcgattaaatattccgcttcaacggaggaagcaataactgtcttaaaaacattgtcgggtaagccaatcttttcaaaaatccgctcgatttccagtccacattgcatagtaacactggaaggttttaagataatagtattacctgctatcagtgacggtgcagcgaatctaagtgcctgccaatagggaaaattccatggcatcagacttgcgattacccctaacggttcaaatgtgactatagatttccgggcgtctgtattaataacttcatcatgtaaaaagactccgccgttgtctgcaaaatattctacagcccaaatacacttgtctatttcagatctggcttctttaacggtttttcccatctctgaggtggctattcgagctagtctttccttttccttcttaaattcattagcaaaggcatatagaaagcccgttctcttacgatagtcctttttccattctttgaaagcttttttagatttattagctaaagttgtaatttcatcctttgatattagtctatattctttaataatttcttcagttgcaggattaacagtcactatagtattagagggtctttcattactttttgttatattgtttttttttaaaggaacattattagaaatcaattgatatccaagcatctcctattcatgtacagcaatttatatcgtacttttaacgattattggaattaaactttgctaatgccctggttaataaaattttggttttcggtgcaactcgtcatggtagagggacggacatcaaatatgggccaagtatcaaaacgtggagtcaatgctgaatccaattactctcctgcttacaagatcaaattgttgcaaaccggaaatagtaaatacgaaaaaagtcgttgtttttgaatatcaagtttttaccttaggtaaattccatgcatattttatggctaataacctaataccagtagcagaaataattccaacgattgctgcagtaactggatcggacaaaattatcaatacaaagaaaataattactcctacgaaactagctgttgcataaagttctctaacaaataccaaaggaacttcatttactagaacgtctcttagaattcctcctcccgtagctgtaatcagacctccaatggaaactaagaggaagtttggaccaaagatagaatatgcaatgcctgctccaatcaccgtaaatacccctaaccctatcgcatcacattttagaaaaatattccaatgttttttcaatcgaggatataggaaaaatatcgaaaagcctgtaatgaagcataggatcagatacatagggtttgataaggcagtgggaggatactgtccaaaaatgacatctcgtatcaatccgcctgaaagccccgtaacactagcaaggataattactcctacgatgtcggctttttgttctattgctttgaatgctcctgtaattgcaaatgctactgtaccaaaataatcaagaaaaagtgttatttgtggataataaataaagacaaattgcaggtcaatcatccatagctagtaactaaaataagatatatttgagattgcattcatttgttgaagtaattagacagtaccaataactaaagatcaattagtcgattctcaagtcaaacttaggattatggagtatggtggttatataaaacagttgattacccttttttaggcttagaacatgcttaaagatagaaaaacaagttatagaatataacagatggaaacatgatgacaagtttcttggttctaatgtctccactaaaatttcaatgatcccagctgaaattgaataaagttatagaaataaaaatctctatgtttgagaatcgaaaacatttggaaaagctaaaatggatttggaaatgttggcaaaaagatgccaactattgatactacgatccaaataaccacggcaatcaatatagccttgagccatcctgtgctataaagccacttgagtgatatcaaccatataataccccctattgcggctgcaagaaagccatatccaaatacataactaacaattccaaacataattgaacctaaaagagcagcaaagaaggctgttttaaatccctctttttcacccatcaactttgtaactacataaatcagaaaagtagatatcactaaacctatcaagaaacttagaattcccaattattagtcggtattaggaattacgattattaagttttatccagccttgacatggtctacgtccctgcaatgaacttccttaaagctatcaaatgaagctgagcgtaggcatggatcagtgtaggcactgcccttttttcacaaatcgttaaagtcgaggatatgacaaattgtaactttatgtatatatgtaatttatataatttaaaaaaaactaattaatcatgtctgaaaaattctcaaaaattctcatccttttttattcaagatatggaaacactgctgaaatggccgaggaaattgcatatggagcaaaggaagttccaaatactagtgtaacacttcgaagaattgcagatgacgttccggctgaagtaatttcacaaaaccccgagtggtcaaaaactgtagaagacttgactaatagatatccaactagtgaagtcgaagatttggtaaaggaaatgcccaattatgatgcaattatttttgggtcacctactagatttggaaatatggctgcacctatgaaggctctctgggatcgaactagcgaattgtggatgaagggatcgcttattgacaagctaggggcagtctttactggagcggcttcagtccatggaggtcaagagacgactgctatttcgatgatgtttcctatgcttcatcatggaatgataattgtgggcgtcccttatgcggttcccgaattaactcagagtggaagtccctatggccccagtagaattgtaggacctatgtcaaataaagaaattacagaggcagataccaaagtagcacgagcactaggaaaaagagtatccgaattggcacagagactatcatagaaagtttcaagattgggaaaacaatacaaatacattcatacttttactatcggatcaaaatacaaattgggtactcctttgattaaatgatgtatattcctcatgaaatgatggtcagcaaacagacatcagggtaacaattaatgatgatggcgataaagtcctgaaattgataaaaaatctactcgaaattacttgtagataccccatatttccaattacgggcattcatcttgtttatgaaatctaaaacaactctttcgagaatttctataatttcttgtcccttttgaaccgatgcctctctgggagcaccagttgccccggtcccggtcaactcactaaatctccagtaaagtcgaatatcatcgccaggtaggttcggaataatctgatctggtgccgactgtaggtcaactaaatcaggtcttgtaaccatcatagcggatgtttctgcttccccaccgtgacctagccccttccacacattgaagatatctgtgtttttttgtccaactaatacccaccatgattcaagacaagcaataaccatatcaggatacttgtcttttaaatttcgagaagctacttcaatcggtgcaatattaccgtcatgaccatttattacaagtacttttttgatctcattttttgccaaactatctagcaagtcctctattacagaaatcattgttgaaaattttagactaatggtcatttgaaaatcattgtgatgtatactaactccgtagggcacgacaggcaagatgaaatacttatgatctgatgagggattgtcgatgtcaattttttctaatatgattttcgcaagattcattgggaatatagagtcagaaccaaaaggtaaatggttcccgtgattttcgcatgaaccgagaataatgaaagcaattgaattgtcgttgacgacattcttaacctgattcgcattcatttcttctaatagaagttttttatccattaaatcaatcacattctaaaagaatttactatactttaaattttcatcttaaattatcttcaacataaattcaaacaactgtatacatttgttgaatgagcttgaggcgtcatttaacataatcaatatctagatctatttaatcatcacatgcaaaaataactaacaaatcagactttgttctttttcttgataatcaattgagaattaaaattgaacctctttcctagttactgaatccaaattgctatttgatccaacgagttcctctatcttttttgccacaaacaaaactaaacgatcttcatactggggaccaattatttgtatgcccacgggaagtatatttgatttttcagtaacaaatcccagtggaattgaaattgctggaagtccgatactattaaataaaactgtattcctcagtaaggcctttcgaacattcagttggagaccgtcaatttttatattgacttttcgtaactttggtgccagtataacagtagttggtattagaatagcttgaattccactactaaaaaggttcataaattcatgcttaatatttcttatttgtttgttggcacgaatgtaatcatcaatgctaatacgagttccctcgacgagcattttcatcacatcagacccaaattggccagcatctgattcaagcttatctgcatgaatcattgaagcctcatacaatctcaccgtcttccaacttgagaaaatattatttgtatactttatatcaaaattttttacgagaattggagtttgtgaaacattctgaatgaaatcaataaacattttcttaatccgagaatccattacttttagaaaatatctctttggaattcctactactaattctgatgttctcaaaggtttgtgggttaacaatgtatttttttttacctttttgaagtttttagaatcgtagagacttttaaaaattaaattcgcatcccacacactccttgtcaaccacccaatatgatctaaggatggtgaaagtgggaatatgccagaagtacttatcaagtcaaaggttggcttcatacccactaaaccacaaagagaagctggaactctgacagaaccacctgtatctgttcctaaagaaaatataaccataccagaggcaacggcaacagtagaaccgccactagaacctccagatattctcgataaatcgaaaggattttttgagtctccgaaggtataatttttgccagtaattcctgatgcaaattcgttttgattatttgtccctataagaattgccccttttttattcaagatttttacaactgacgctgtagtactagaaacgtaatcagaataaaattttgaccctgcagtaaatttgaggtgctttgcgtgaatcatatctttaattgagtatggaattccatccaaaggatccaaaaggtcatttagttttgcccgtttatcacatttttcggcaatttcaaaaatttcttcttcactccgaagagttatgaatgaatttagtatatgattgaatttttcaattcgatctaggcataatcctgtcaattccgaaggaagtaactcgccagtcctgatagatttagatagattttctatggtaaaaggaaaaattggaggtttgaaatcaatcataattccaatcctaccaaccacttttcaggtaataaattatatggtcttatttaagagagtggtttactttaatatgtaaattcaaatcattttcccgtcacacgtaagtaattattcttgccaaaatgtatcaagtttatcatcaagaacaagtagtaaaaaggaatattttaaaggatatcaactgttgtaagatattttacgaaatataggaaattattttaagattctaatattggccgatttttataacaatcacatctggatttgttttcatgatgattatctaagcgcagttggtgcaagagtcgctatcaaaaaagtgtcaatttacagggtagttatatagtagtacaagtaatttatgagggttatgtacttagacatcaaagtgataaatacttggtgtataatactttggtaaaattactcatttaggaatagtataaaaaagtctaaattattctaaaattcgttaaactaagaatccaattatattatgcatttagattcaaactagtctataaattcaatgatgttttattcttgtgattttaatccaactctaattattcaaatgagtgaattattcttctttagaggatatgatttgtgtctataataataacggtaacatttttaagtattccaatatcaataataggatctttagagcgaggatgaaaatctaatctaaaacaaaaaagcaatgtaaaagattaattaaatatattcctaataagttttaaagaacaaaataaaatagattgccatactaatattatcatctatgataggttaagataattcatccaaacattgttaaaaaatgggtaaatatgatataagagttttcaacctgatgaacaaaatattaacaggaatagtttcagccttactcgtagcaggaattgttggaatgtatattccaaatgtatcagcaactgttgttcaagaagaattctgttctggtaatagtgcactcggacaagaagcaactagttcagcagaacagggcccatcacaagaccaagcaagtggttctgacgcacaatctatagcaccagaatttaatgctttaactggtaacaatcttaatctcaatgcacaacaaaatggtgattgtttatccccattgcaacgaggagatagtgctccattaggcgcatctgaaagcgaaaatccattagcatctacaactgctctccaaaacagcactgactaaaataatatagaccccacaggggttttacttttttttcaatactttttttgggttttctggatttaagcgcatgatttctttttgtatattgagaacagaattcaaaatgattagattattatattgagaaattgtttctaattaaatgaaatcgactactgaatatctaacattcaataccaaatcaaggttccagctgatcaatataacccccgaagtgaaaaagattttggatctaagcggaatcaaagaaggtttgtgtttaattaattcaatgcatatatcagctagcatatttatcaacgatgatgaagcaggattacatcgtgatttccatgaatggttagaaaaactagcaccgcatgaacctactaatcattatagacataatgatactggtgaagaaaatgctgatgcccacctaaaacggcaaatcatgggtagggaagtggttgtcgcaattacaaaaggcaaattagactttggtccttgggaacaaatcttttatggagaatttgatggaaatagaaagaaaagggtccttgttaagattattggtgagtagcagttaccaatttattatatgttgattattagtttagtaacccaaatgaaatcgcatgtaaagggatcactacaagtaaatcctaatgttttttccttcaacattgtaattaggccactctagtagaccagaatgaaaaggtgaatttagaaataccatttacctgacgtaaatatattttgatgattaggatttattgataaaatgaatttgtttcacatagaacctcctcgtgctcgatagagaaatcttgtcttcatgttgaagatgaaattatgccaaaaattcacataaaccagtaaatggtgaccaaatttattgacgagaaacggaaataatttgtcaacattatatacctctttatatatagtataatggatgattttttgacccaaaataattttcccctaaaaagctggcatattgaaaatatggaaaaaaccgttataaaatatgttaaaggactccctgaggatgcatcgaaatgggagataaggaaacacaaaaaatatggcaaattatcaaatataattagaaatatccattatgacatcaaacatggcgttactaatgatcaagttattgaagtgtttgtaaaaattcgaaatgagccagtattctgcgatttacagaataatctcgatgcaatgaatagactcggtgatttagaaaagcattggaaagaaatatgaatggtcaaataacatcagcctaatacttaactaaccaaaaccttccaaaaagaacttcctgagcacaacgtatcaaaccaggcatctgctcatctaaaagttattggtgtaatggttcagactgagtatcaggttaataaaaacagagagcttttataaaagtttcttaattgattcctcgatccataaattaaattaactgattatcttgaaaagacactcaattatataaaacggatatctataagtcatcaggtttacaagttttcaagtagtcatcttctcaaaagaatatagctaccttctgggtctttgatttgtattcattcgacgatgtgaagaagaacaataaccacaatattctgtaatgccctctttcccatggcaaaaacactcacatttacttcccgctgaaaatttttgtctcatgcttataataactacaccaacccttataacaattggtaattttacgtatataagaatcgaataattgcaacttaagttagatttatttgattattgaaggataaaccgcttttaaaatcagtcaaccttattgcccggtttactgcatattaaattacatctaagtaagtagtttaatgtactgtagaactttgttttcaataatgaatattgaattggcttcgacatccaatgagatcaagatataatatttgttttcactaacactctttaatggaattgtagcacgtattagtttgtcatacttgcccactgaataatttagatctcctaaatttttctgaaaatcttcacgaatttcagctcgaaatactgcctgcatggcgtagagctttgtctcatcgtcattcataagtacattcaaatgttctcgataggaagttcccaccaatgtacccatcctgtttgctatgcctacaaaccggattagtggatccaactcccttatgtgtttgcagtgattatttgcgaaatcttcattattaaaatccaataatactcaattaatatcaaatacgtttcatgttattaatttttgttcttttctctcgaatatgaaacatggaacctggtatcataccaacatgtcacaaaatacccatcattcaagactagataaattagcttaatgtattagcaaatatttttcatggaaacaatttattttatttattgaataaattcatcgatagtaatgaaaaatatatcttaaaatttgaataagaaataattcgcttttagaatgcataatcaaacaaaattcttgtctatttaaagacatgaatataattagtttctagtgaaaatcaccatgctgatctagatccttcgctaaattattacatgataggaatagaatagtgtgcctcattccctgacatttttttttgtccttcgatctttgacataactgcgtattcggggtttagatcaattgcttgattcaagtaaaacacagagtcaggtaagtcgtcatcttttgattttgttttagatacaaagcatctataccaaacttctggtatcaagggatcttgttttaaaatgtggttgtaaattgagacggattctttataagatcccaagtgctccataatgaatccatatgtatataggatatctatatccgttggatcgattcctaatgctcgctttattgtttccaatgcttcgttaatgcgagtaggaaattgatttgcgagtatccacgactttccatttagtgcttttacgttatcagaatcaatttctagagttttttcgtatgagaagatggcttctgcaaatttagatgtggccgaaagggccattcctttattgtagaatgcatctgcgtagtaggggtttatttcgattgccttatcaaaagatgtgatggcttctgcaaatttagatgtggccgaaagggccattcctttattgtagaatgcatctgcgtagtaggggtttatttcgattgccttatcaaaagatgtgatggcttctgcaaatttagatgtggccgaaagggccattcctttattgtagaatgcatctgcgtagtaggggtttatttcgattgccttatcaaaagatgtgatggcttctgcaaatttagatgtggccgaaagggccattcctttattgtagaatgcatctgcgtagtaggggtttatttcgatggctttgtcgtagcaggctatggcttcttggttatcccctaaataatacaaagacaagcctttgttgttgtaggcatctgcatattgtgggtttatttcgatggctttgtcgtagcaggctatggcttcttggttatttcctgtaactgccaacactaaacctttgttgcaaaatgcaagatcatacttggggtttatttcgatggctttgtcgtagcaggctatggcatcctgacttccaatatagtacaaagacaagcctttgttgttgtaggcatctgcgtagtaggggtttatttcgatggctttgtcgtagcaggctatggcttcttggttatcccctaaataatacaaagacaagcctttgttgttgtaggcatctgcatattgtgggtttatttcgatggctttgtcgtagcaggctatggcttcttggttatttcctgtaacggacaaggctatgcccttgttgtaaaatgcaagatcatactctgggtttatttcgatggctttgtcgtagcaggctatggcttcttggttatcccctaaataatacaaagacaagcctttgttgttgtaggcatctgcatattgtgggtttatttcgatggctttgtcgtagcaggctatggcttcttggttatttcctgtaacggacaaggctatgcccttgttgtaaaatgcaagatcatactctgggtttatttcgatggctttgtcgtagcaggctatggcttcttggttatcccctaaataatacaaagacaagcctttgttgttgtaggcatctgcatattgtgggttcatctcggtgttctgatcaaaagaagtgacggttttttggtcatcatggttagaaagaatagaaccatctgcatattgtgggttcatctcggtgttctgatcaaaagaagtgacggttttttggtcatcatggttagaaagaatagaaccatctgcatattgtgggttcatctcggtgttctgatcaaaagaagtgacggttttttggtcatcatggttagaaagaatagaaccatctttggtagaagtactgttattcttggacggtaatgatttaattaaatttgccaatacctctaattgagtttctatcgactccttgtgttttgtagagatatcagagtttctgatcttggcgtttataatagtagttatgtcatcgatagaattatgtaaagaaggatctgaattttcaatagagtcgtcctttatagaaatttcgccaccgtcatcggcagtattatcgatatcggcgtcgttattatcggtattcgaattagctgtattatcccttttcttatctctagggatattgttaattttataatttccatccaaataatgtcaattcatattacctctatcatttatttaaccattatagttatttgtgagacaatatagaattaatatcgcgatattaaaaatcttatatcaattcataataaaccttataattcatttaccaagaaatcaatgggccaatagaagtttatagactgaaagaatgtctaaaccccctcttaatgagtagtagtatactcactcctcaacatcggatttgaattattgctagatagccatatgatcattccaataagtaaaaatagaaaaatatacaaatattaattatgattttctaacaatatttaaacattttaatagaaatagaaggttttaaattattggattaacatattaaactaatatatagattctgttacctagtacagatcatcctaattacattcagcggaatgtcgtaacattttagaaataaaatatgatacctccttcgaaataatttgatctaatgatagatcttttgtctctcaaatgacgatccaacaatggagaactcaaaaaatttgtttaacggtaatgtcggtaaattaacatttccgataaattaatgataccctaattcatagagtagacaatagagaccaaattggcattaccaaatatttcgttttaaattcttagataataggaacgaatctatgtagttgagaattgttggcaataatcactgtctattcataaatataacttcatcttttcaacatttttttatcaattatacagttaatctttaaattttcaaattccagaattaaagtcacagttaacttacaataacatcctgtgttgcaacatatttgaaatattaaagtagaactttaataattaaataacttttatacaatcgaaaggatattgaatcctgttccttatgacataactcataagggttatgcaagttattacatagtatgaatagtatcattagggaaatagcaactgcattagataatcagatcagaggagattatacaataaacgaaaatctcacagcggatcaaataaagatgattaatgattttgtaggttcttttaacgagactatgggtgttttcccatttcctctaaagaggagataataatatttggaaaaatggaatgataacgttagatcgattttagcgaagttagacagtttatagttgaatggtaacaatctgatgaacgacgaaatggtgcatcataacaagtgtttgatctgcaataaggcaattagtaatattaatatgtacttagttgtagatgaaaccaagtgcttatactttgataatcaagattgtttcgtcttctacaagagattttctaggatctatggcgatatattttctgcctttctccaattgtaagctaaattttgtttgtccatcgtctccgaagtttttttgtgtgatagtagccttgagaatggagtaaaatacatatgattgtcggttacattcgctgctaatgaataaaattagttgatcccatatgtttgataatgataacggaacttatcttaagatgttcccgaatgttcttagaagtgcgtccattgtgcattagtattcctagcaaaaaaatggattcgcccttactatttatatttgagaaaggtaagacgaattcagttcatcaagttgagtaagaagtaagagtcattgattacaacccaatattatacgtcacttgctactgtgaaatataatattatagtggtattaaagatatatactttcattattaattgatttggtattcgaataaagatatttttcccgcaaggtaataaatattgaagtatgcagtatggccctgttaacttaacgataaatctttagcttaaagacgctctatttctgttatgttaagtaaaagaactaaaacatcttcagagcatatttactatggtctgtatttgtactttctaggcttatcgcttagaaatactgccaaggcattgtcctttttacatattatcaatagaagtcacgttgcaatttggaattggattcaaaggtataaacctcgaaaggtttcaacaagaagaacaaaaatatcagaatacctcattgatgagacattaataaaagtcggctcagaatactcctggttatgggcagcaatcgaaccagaaaataggcaaattctcgcactctttcttagctaataaatccaaggagaggaacatgcttatcgcagagagatttatttcaggtctgatcaagattcacggaaaacatgtcgtatcaacagacggtggaacctggtacccaatggcttgtagattcctaaaactaaaacaccatatcaattcttcgtttgagaaaagtctgattgaaagaactatgcagtacatcaaggatcgaactgaaggatttgacgattactttccatgtagtaaagagaagtgtaaactagaccatgtcaaaaactggttgaatctatttgtaaaaatacacaacaaggaggtgccaaacgcctaagttaacagcgcctgcagtatattcatccaagataaataatgcattttacatccaggtatttttttcaaaggacctgttatttgtgtcgaaatggttccttaatatccttaatatattaatttaaagatgcttagtgttgtttatttattaaagaccaaaattaatgaagccttccagtactgatatatttcagtattagaatgttaactaaaacaaataattataccaatgattaatcttgtgatatcattagatactcctgatttaatcgtatccaggatggttgtttcattataggagacaaagataataattcaactttagaactgccaattcacggtaatcctgttcaaaaaaaataatagaactcgttttataaaggaagattggttatttgttgaaaactgattgtcaatccaaatggctgtatcaatataggaatttgataaatggtccttcagttggtacttattatatcagcggaatttgtactacaatttttcatgatttttagccttacttaacgcatcttataaaataaatcctacaatggataattttatgattatataggtacgtcatttccttgagttaacataacatctgaaagattaattaaggttaaaatattagtcattaattcctaatattgattgaaatctgttatagtcaaagatttatttgaaaaaaagccaaactttgtgactatttcaataatatctttcatttttttgctattctgtgacaattatctgagctcttctttagatgtaatgagcgatatagtaaaaaatcaggcaggtttagttttatttgctgttattttaatagttagtataatttttagttattttgttttggaaaatatctttaaattgctggaaaagaaaaaatcaattttctcaaaacataagaaagtattcagaataatgcaaatttctctgtacggtctatcattaatattgttggtagacttgctcagtgatcaaaaatattatacggtcaatttaaacctgatagttatgataagctatggttttagtttattgatcagtttgttggccagtctgaaattgttctcgtggtatagagtaaatagaagtagatttgtaatattgttcggtttaactttattcttcatttttataaacagtttattgtctttattcctatttgaagtgctattaatagagaaaccttctgaatttgacatgtctactccaaatatatttgattttgagtgcgaagaaaacactataagttgtatccttaaggaaaacttacttttactgcaaaactactctctagtaatttattttgtgttattttggatatgtacaatcttgttactacatcatcatattaataaagtgggaaagataaaattctttgctctagttgctttgccactaatcttattttattttcaatttgtttatacttacgatgatttctttacaataagtaatgaactcagatttgatgaaaatatagcatttgcaatacaacttttcatcgcaactctcctaacagcctcttgtggaattttatttggatggggtttactatcagtcgctaatttgctgaagatatccatacaggttgaaagatttcttaaaattgccgctttaggtgtaataacattctttatatcagccaatgcgactgtcgcttctggggggatgccaccgtttggtgtacccaatctagtcttcctcccattttcaacgatcttgatttatgtaggtatattctattctattacttcaatagcaaatgacataagcataaagaaattcataaagaattctacatttaatgaattaaaaatcatggggaatttggccgagtctcagatgctggatgacatgaaattaagagtcttaagcatgaccaagaagttctcaaatgaattacaggagaagagtaatacggaggaagccagttctgaagataaaatgaaggactacttgaacgatgtcgttgagatttttactaaacagaaaaaaaatcaaagctaagcataatctttgattttttcaacgagctcatctattttaatggaaaaaggatgattgggcaattcacttactgtcaagtattctctttctttgaactgtatgtcacaatagcaaggaatctcagccaaggtgccgacttttatagattctggaaccgtattgctgatcatatttttaactttttgtaaatactgagattccacattagcctcaaattcatgaacatcattattatgtgaaggaatgcaatatcctgatactcgattcagcaataatttgcaaatggatccactttcaatcagggaagaataaatttcatttatcattttaatggttcctttcaaatctaaatcgcccatttttagtgttagtaatactatgtcggatactacaatggaatttatagaccaatatctgataccagggctggtatccattataataaaatcagcttctctccctatgagtatctcctctctcattgagatgaagttcctaaattgcttcaatttttgttccttgtcactgtttagatttccttctaattgatatatatcatcctttccgccctttgaaaaacccaaatataattctcccttaaactcgggtttcaaatacgccttggcatcaatcatgatatcatctatactagcattatcaatcaaataatcattaatccataaattaggttcgatatcaaagtaggtatacagactaggggcgtaaaaatctaggtctaacaagtaaacagaataacccttagaagccaataaaaacgaaaaattggtggctattgttgtttttcctgtaccacccttataggaatggaatgagatacacttccccaatttacttaaattaaccacttcaagtattaagagttttaaatctttcagatgttatgttaactcaaggaaatgacgtacctatataatcataaaattatccattgtaggatttattttataagatgcgttaagtaaggctaaaaatcatgaaaaattgtagtacaaattccgctgatataataagtaccaactgaaggaccatttatcaaattcctatattgatacagccatttggattgacaatcagttttcaacaaataaccaatcttcctttataaaacgagttctattattttttttgaacaggattaccgtgaattggcagttctatgaaaaatgttgatcccttttcgatattattatatgcaccaattttcccagaatgtttttcaataattattttagatatataaagaccaagtcctgtcccaagtttatctgtggtaaagaactttgtaaataaattttctaggtttgtcccctggattcccaccccactatctttaacttctatgtgtagcaggttttgatttctttctaatgatatttgtacctcccctttcacggtaaatttaaaagaattactcaataaattgtctaaaacttccgttatccgaattttatccgcatttataaccaaaggctcattaggagaactgaaagtaaatttaatattctttctggcagcttgtatctgataatcagatatcaactcggtaacaactttggtaatatcaaaatcatcccttcttaaagtaaaaatatcgttttccattctggcataatctagaatattattggtaagaagatccagtttccttgcattccttgcaattattttaagaagatcgtttttctgatctgtgttcaatcgcgagtttgattggaccatttcagaaaatccaagtattggttgtatcggggttttcaattcatgtgccattattctcataaaattattatttgatgtattcttgatagccaattttgttgagagtgacttaacctttttctccaatatcgactgtttccacaatgactcaaaaatagctgcattataccaaaccaatgattccttttttgtgagcacattgaaatagattggtcgattcttttgcttatcaaattttatctctgaaaatgcggatatgtacttatccattacggaaaagaaataatgatcctcactttctggtagatagtttatatccgacgataaatccagtttgcttctaaattgcttaaggagacgaatactcttcctcttatttggtataatgattcgcatcgaatactctgatgagcgtttccaatccctagaagaaaatagagcctctatattttcgtgaaataaatcgaagattcttgaggatgagaaaaatagcaagaggtctttatgacaatttttcagctcaactgaaaggatttccttgaatatagtctcatctgccttaatctctgttggatcaaatttattttttcttatctcataaattgaacgttggagtaaatcgctcgaatgaatactccatttaatccgttctagccccatttcgtcaatattattgccataaactttttttagtcgacaatgaaatatgaaacaattcttatgatgaaagtgcgttcccgatgagtccttttcgatatgcaagtcattaggacgcttgattaattttccacacaagtaacatgtgtatggaagattttcaaatttacctactggtggatcataattgggaagcgttgatataaataacgatttacgcaaattaataaataaacttatctcgttgactttattaccagaaaaaaagaagataaaatttttaaattattaatattaacgtaaatgtgtccaatcgcccctttgtttttaattttatagagaaaataaactataaaagaattctcagaaataacactaatcctctagacctgattgaacgactaaatatttccaaaaagggaaactcaagaactagtccaaaagtattgatattgactaagaaaatagacatagaatcggatctgcttggcatccaattcctcaaaaatggaatcgattatgtaaaaataacagaagaggatatacctttaaattttcaaattgaattcaaaattggaaaattcaatgactccgtgctacatttgggaaataaaaaattcaatcctgatgaaattgagataatattatttagatattttgatccaaaatttttgaattattattcagtgggagtatgtcaaatgtatttcgcccaacaatggtatcaagcctttaactgtctaccaatagctctagacactttatggataaataacccacaaaggacttttgaatctgaaaataggttgaatcagctgctgtcggcacaacggctcggttttaacattccagagacattaataaccaatgaaatggaggcagctaaaaagttttttaagaggtttcctaaatctgcaatcgttaaggtacttcatcatcacgagatttatctttaccaaaaatcatataggttcctaaccaacaatattgaaatcagtcatttaccaaaattcaatgagctaacttatgcaccagtaatttttcaagagaaaatagagaatgactcagaaatccgggtaactgtggtaaatgacaagacattttcatgtagaatttcaacaattagggataagcgccatttttctgatttacataaaataaaggaaaaagagttgacattttctgaaattaatctcggtaaaaaaatggaaaagctatgtgttaaactaaatagaaaattaggattaatagtttcaagcatagattttgtacaaagtaaaaatggagaattactttttcttgaaattaatcctataggtgactggaattggattgaaaaacatactaaattaccaataacaaaatcaatgtttgattttgtgaatgatcgattgaaaggaaatggatcgcatggttcataaaggtattatttttctaggcttcgaagaatttccttgatccatttttgaaaatgagaatataaccatggatttgataatattgaggtttagaattgtaaaaatattttagttggtatgacattcaataaaatattctataatgggaaataatatcatagtaatagatgatgatgtaggaacagcattattcttcaaaatttgtttagaagataagggataccaagttagtatttacaatgatccgaactccctattagaggaatttgagcctggaatttatgatctccttattactgacatacgaatgcctagaataaacggttttgaactggctagtagaattagaataatggatagtaagattaggatttgtttagctaccgcatttgaggaatattaccaatctattataaagtcatattcagatttgagttttaactgcattatcagaaaacctattaataaagataattttttggagatcattgaaagcaggctgagtgaacctaggtaggttcagtgattttgttacgacctgtcttcctgataaaaaaattttaaattattctagtccaccctttctattttaaatcctattctaacttctacttgatattcaatttgctgattttcatctaacctaaaggtaactctccccatctctccccattgaatattctttacagttttagacgcttccttaaatgcgttgttgacagcttcatttattccagctggcgatgttcccactatttcaatatatttgtaaaccattattgattttaattatcgttacataaaaatataatcaaaaatctacaaataacagattcatgatagacattgttgaaattttttcaacaatgatgattattgattaacaaaagtcatattagccattattcgcgattacattagtttaatcaacctaagctcgttcaatgatctgtttcaaaatatgacggtgacatttgtttatattttctggttcataacaaagtaacacaacatcattctttcttgaataatcttttatccattttatattagaaatagctggaatagcattcatttctttttgatacgaatccgtatactcattaatatcgagttcctcacgttcaaacttatcagccaaactcttagacggggataaatcataaaaccaagcatccattttatgttgcagttcaaagggcagtgatgaagaaacagcaatcctgtagaaatcattcttatatcttgaaagattggttaatgaatctgtatatattgtcacaaaactcattatagcgacatcattaaaaatcgtttttgatatcgaaaaaaatacggataacctgtaagaaataggatttttttactatttaaatacccgtttatggtttaattttatttgataaatgtcaaatagatatgctcaccccgaagtcttagttgacacaaattggactgaagctcacctaaaagatccgaatgtaagaattgcagaagtagactatgatccaaaagcaaactaccatttaggacatattcccgggtcagtgttatttgactggaagaaagatatcaatgacccattgaaaaggaatatcatttcaaaagaatcgtgtgaagaattactcaacaaatcaggaataaatcaggattcgactctcatactttacggagatttcaataattggttcgcggcatttgctttttgggtattcaagtattatggctataaggatgtgcggataatgaatgggggcagaaaaaaatggcttgaagaggacagatctatcgataaaacaattccaacataccaaacgggcaatttcaaagcatctaaccccgacgagaaaataagaacatatctaaatcatgtgtcagaatcactcaaaagcaaccaaagcatattagttgatgtcaggtctccacccgagtttactggagaagtgactgcgcctgccgaatacccaactgaacacgcccaaaggggaggccacattcctgcagccattaatgtaccgtggggaaaagcagttaatgaggatggaacgttcaaatcgcccgaagatttgatgaaactttacaaggaaaatggcatcattccagaaaaggaagtaatttcatactgcagaattggagaaagatcatcacatacatggtttgtgctaaaatatcttttagggtacccagatgttaagaactatgacggttcatggacagaatggggtaatatgataggaaacccgattgaaaaatagattattcctttattcttgattttttatttttttaataattatattgtataagtaattattactagagtttggtaaggaggactgcacggggtttttctcttgtacaatttcaacgatttcttgtttgttttgatcagcccaacgcaataattcaagatcagcagtaggatcatcggacacaagtcttatgacatgtccaatacgcatatttttctccatgaattcatctaattttgctaaagtggcggagcattcagttcctaattcaaacatgtgaaaatcagggaatgatttaaaacatttcacattgaatttcttaatttgaacccctatctcattcttacactcttcgatggtttttatcgattcaagactatctagattatcattagtcctgatctttgcaatccatccacgttcaaatggggagtcgttaacaatcttaggatcattaatgatttcttgatttatttccacaatactcccagatactggagaacgaattattccaaagtggtttaaactctcaatggtacccaagctcctatttctaataatgtctgtgccgacaggttttgttttaaatttgagtaccctgccggttatataggaatatactggagttatgcctacaaggacatgcctaacgtcagtccttttatcgtccggctcatcagttgattttatccatgtaaagttatcaagatcataaaagtaatcgactggaaatacacaattttcaatcctgttgcctagcgtagtcattatttcaaataaattaagggaaattatttcaatataatagtaagcattttattttacggtcacggatttggccaaatttctaggataatctggatcaacttgtttctgtaaagccaaatagtatgacatcagttgtaatggaataatttcaagaattggataaagatagctatcaacttcaggtaattctacaaactgatcatatacctcattttttttatttgaaattccaattatataggctccgcgtgattttatttcattagaacttgaaataacgtcttgataggtttcatcggtagggtttaatacaactaccacagactctttgtcaatcaatgccagtggtccatgttttaactcacctgcagcgataccttctgcatgtatataggccaactctttaatttttaacgacccctctaaggcaataggataatgaatggacctgcccaaaatgtatatatctttaatatttgtgtccaatgatgagacaagcttttgaataacatcatctaagttcaatacttttcttaccatcattagtaaatccttttgattaatttcatcaaaaggcatttgaccccgtgataagatattgacgattttatatattatcatcaactggcccatgaaactcttggtggcagcaactcctatttcggggccacaatttagggtaagaattgaatcactcattcttgccagagacgaagtaggtacgttcactattgaaaggatttttgcaccattttccttagctttttttactgaatgtaatacatcagcagtttcaccactttgggaaatggctattacagccgaattggcctccaaggagtccgaagaatattgaaattcgcttgacataattacctcggtttttatcttggcaaattttgaaaggagttgctttcccaacaaaccagagttgtagctagttccgctaccagtaatatatacattggaagaatttttcaagaattcacaaaaatttttaaaattattgaaatcttgaaatggtttcaacagagttaatgattgttcatgaatttcttttatggtgtgatgtgcatactttcccttttcagtagaccctagttcccatgcaacctgggttataggtcggtttacaattcgttcattaatatcaaatatacgataagaattattatcaatgactacaatatcaccattatctaagaaaacagatttatcagtgtatttcagaaaacctaatacatcgctagacagaaacaaagcactctcagaaattcctattatcaaaggttcatcaaatcttgcaccagtaataataccgttatcgaaaatagcgacaaaggcaaaagagcctttaagaacccgacaagttttcatcatagtttcttttacattagaggcagattctttgtagtatttttctaacaggtgagcaatgacctcactgtcagtctgacttttaaaaacatgaccatctcttgttagctccgatttcaattcttggtaattttcaattattccgttatgaactacagcaatattggatgaacatgaataatgtggatgagcattcttatcgtttacaccaccatgagttgcccaacgggtatgccctattcctatttgtccaggaagtttattgagatttatttctttatcaacttctgctacttttcctacgcccttactcaccaaaatatttccgtcatttagggttgcaattcctacgctgtcgtagcctctatactccatctttttcaggctctcaactagtaacggagccgcggagactaacttcccactgtacccaataattgaacacacaactattcttaaaaaaaattatttaaaacctttatcaaaaataagatctttccgttataaaaaaaaatataatcaacagaaataatttgttcatcgctgttcataattatttttttaataaaacaaaaaatatataccagcaaaaaaaaaattataacatcatatattatggcgattgaaaaaaaaataatctatgaaaaggaaggaagactctatgagaaaaaaatcatagtgtttgaaaaacaaaaagaaatccaagttttatcaaatccgatcgcctggaagatactgaggctgatttccgatagacccaggtatacagctcagatagctaaagaattagagatctacgaacaaagcgcttattactatattagaaaattagtttcaattggagcaattggagaatcaggaacatattttgtaaagggcggtactgcaaaactatacacagctaccagccccgctttcggtattgaaatggaatggggcgaaaaattatcaattgattacaacctaaatgattggaaaaaaactatcgaattcgtggctgctagaaagtttttaaaggaattcatcgatgaaaataacaaattcgacggcttagtcatcgtgggatcgcctaatcctcacggaatctttaagacatcagcaagagacgggcattatgcaattcaattggctttttttttaggaaatatatgcaatttgcctcaagggtttgttgtaaagttagacgaagacgcaaaggctgaaaaagagctagaagataataacttgatcataatcggtggtcctggaacaaacatagtttcttctgaatttaacagatatttaccgatcaagtttaatgaagaaaacttttggtcaggcctcgtggacaaacctgggagaatttaccatcaagacaatttggggattattgcaaaatttagaaatccattcaaccacaaaaaatcaataattttgatcgctggggtgagatcaattggaactaaatctgccgtaattgcatttactaactttagtaaaaaaacattttcagattattcaggagctgagcaagaatgggaagctttggttcaaggctatgacatggatagtgatggcaagatagactatgtcgatatagaaaaagttgtaagaacatgagtctctaaaaatttcaactgttttttataggctcagaagtttcaatcgtaggagtaaaatgcacaagtatctgaggttcttcctctttccttaccaaatagcctggtagatttatttttctatttcctaagctgacatgaccatgtacaactagctggcgagcttgatatggtgattttagattagattttttcataatgatcgtttgtaatcgcctctccaaaatatcctctatttttaagttcaaaacgtcatccagagacgaaccggtagaaacaagaccaagcctggaaagatagtttaatagctgtgtttccttttcgtgtctgacatcaatcgataaagataaaagggcacgtgcttgattccttatccgggcaatttctgtttgtgctttccataactcacgcttatttcttaaaccataagaaccgactacatataactctgaacttatttgatcgcttgtccaaatgctacgaggtcgattataattcttttttgattttctaggatctcccattcaaatcacctcaatttatttagatcctgttgtcccagctggtgcctttcctgaagccttctttacccccactgcactggccttcctgcctgtagttctggtacactgacctctaactctcaaaccaaacatatgtctgtaccctctccaactcattacagacttttctctgtcaatatcatttgatttggtaaaatccaaatctgatgtaattaaatgaatatcggctcctgaatccatatcttttcttctattaagataccagctcggcacaccgatagttcctatatttctgatagaattctcaatatcagaaagttctttatcagtcaaaaatcccacccttaagtatggattaatgttcaaagactgtaatattacctgagacaaattataaccaacacccttaacttcacttaacgcaactactgactttttgctgccttcgatatctttcccggcaattcttagaatatgtttaaactcttcgactgacaacttgcttataaatgagcattccattttcctaaataaaaactatgctagccgggtcaagacaagagtataatttttctgataataattacaaggacgactcttaacgggatccctaaattgtaaaatttatataaaaaggatcgaataagtgtaataataggacagaatataacgaaaacagcagaaataagtcttatatctatcttcatacattatataggttaaaatggttgaaaacatcatccagaaaagaaagataattcagcaatcggatgaaaaagaatgggaaagctatcaagctgatgtagaactagctatagagaaccactaaaaaatagattattaatatttgcattatcaaagaaagaaaacagatccatgtgttttaagtaattaacatatttgtctaaattattcaaaaggaaaattttaataagtcgctagtgatatatttattataaaatgatatctgactggttgtcccgggtaggaagtgctattcctagagggttctcgcgccattatatcttggagctgttagctgaacaaccaatgacgggtaaggaaatcatcgacaaagcaatagttcagacaggtggaaaatggaaaccatcaccgggccttatctacccattgcttggaaggttactggaggaaggactaattgaagagcacgaaaatggtagatataggataactaagaaaggcatttcgatagcctcagatatcaaatcagcgcataacataatgcaaaaacaactggaagtaatgttcagaattggtaatatgggaaaattcatgaccatggatttgattgacagaatttcagcaataggatccacacttagttcaaatctggacaggatgacagaagaagaaaagaataagtataaagactttttagtgaatgaattaaagaagctaaataatcaggaaaaaattcaagttgatgatagaaaagttgatgatagaaccattacttgactaaaatgaacaatgatttgattaaacaaggggcttattatctgttaaggggaggtactctactatcagagccttgtaaaaaatgtggaaatcttcagataaagtataaggatgaagtaatttgtatcaattgccaacatttagaacaggataaaactgaacaactagaaacccttcctaatgatatcgaaactaaaaaagagttcagccacgtgaggagcgacgataataataaaaggactctgaatacttttgatgatatccaagaagtgttgaatcaagtagaacatcaggttcttcaaactttggttgaactcaacagagaacaaaataccacgaccagcccaaaaaaatacaaaagatatttgaaaattgttcaaaatagtttgaaaactattgaaatgattaaacgaatcaaacagctttagatataatcgcctgccttttacaaaagtccaaaaagatataaatctatatctaaacatttttttgacctagatttgctatgctcaagttagatagagtaaaaggtcaactcctacaaaatgacaagcaccatcttgatcttgaattcataaaacaaaggctgataaaattttctaaatatttagattgatcactctattttgatcgctagatcctttaggatattacatgatttttgcaaaggttatcaataattttaatataaaagaaagaagtataatcgacaaaaatgatgaatatttcgatcaagatgctcaaagaaataaagttagacaattttattttttttgcctccctgccagatatgggtaaagttggtgggcttgtatcagaacatttgattaaagaacttcaagtggaaagatttgcagagatcggaatctttgaaaaaccttgggtaaaaaatgaaaatgggttagtcaagcctgtaatagatacatacgaccttttcgttaattacgaaaataaagttataatcatgacaggtaaagaacaaccccaagatcctactaacctctttaacttgtgtttaaccgcttttaacataataaaaaatattggtgttccaagaattatttatacgtcgggaggatatcaccagcctcaattagctcaagcaccaaaggtatacgcagtctcaacagataacgagatggttatcaagttaaaaaccctaggaattaatatctttgataaagaaattgaagttattacctggtttaatggagtagttcttggaattgcaagcgaaatgaagtttaatgcgataggcctttttggggagatagtggaaaccaatgaaaaacaacctttagctgcaaaatctgttttaaaagttttttccattctagagaatattgcaattaataccgatggatttgatttggaatatgagaatcaaatgctcgataaaaacaaaagaaatgataactatggagaaacatcaaaaaagtcagggcctggaataggttaaaatacattatatcgattacagaaacaagaacggactttacaccgatcctacaaagggaatgatcgaattgtttctgattaaaaaggggttcaaatcattgtaggcaaaaagcaaactaaaccccaagtagaaaaatattttcatttcaagtgatcgatgtttctttaatatgagaaaacaatagaatcgcaatgaaaatcatgttactagatctgaagatgatccttgctagaaaagcatcgacttaatctaaaagttaatgataattggtcagatatggttattttgtaccgaaaatgaactggactattcactagtaaaattatacactttttaaagaatctagttttatgatttgatagtactccatttgttgacgaaaataccaaaatagaatttaattacactaatttcaatacaaattaaaataccaaagatatgattagtaataatgacactaatatcaactaccagaaaaattaattcatcgggtgaattgatatggagcattatctcggatattgataaggatcccgatttttggcacggtataaaagctgtgaaaaatataaaaagagaaggaaacacgactgagcgagaaactattattgcattcagaaattcaaaatgtctagaattggtaacgttaatacctccaaaacaaataacaatagtaatcagagaaggaccaatagtaggaacaaagataataaatgtaacaaaaatggacactgaaaaatgccaaatcagagtggactgggatattcatatgaaaggattaatgagtttgttcacattctttatcaaaaaacatattttaaagggaacagatgaagccctagaaaggattgccaaaaaggtcgaatgataatatcttattgattggattaaagaataaaaatattaccactactaattctagtattcgccggatcaattctaagcatttataccatcagtgcaatggtcatttgaattaaaatccttcatattgtcaattcatggctaatttttaatgaaatcaggatacgacatgaaataatgatttagcgcattatgttgcggcccttagtttttgtcataaccttttcttttgccaatttaaaaaattcaaaagtaatcctaaaattctttaattcctgttttgttattttactatttgtagtattaacattaactgcctcgaactttctatgttttcttagaaagtcccttagagccaaaattgatgcatgattaatcatgccttcaatttgagccccagtaaagccatcagttaatttcaatattctatcaatagtcacggttttttcatccaaaggcttttttttaagatgtattttaactatttgtcttctggattcgactgtaggaacaggaatttctataatcctatcaaagcggccaggtctcaaaagtgcttcatctatcaaatcaatcctattggtggcaccaatgacaaatacaccatctaaattttcgattccgtccatctcggttagaatctgactcatcattttagcagttgaatctgtcccctctttctccgttttcctttgaattgcaatagaatcaaattcatcaaagaatacaatacaaggggctatctgtctggcttttctgaaaacttcctggattgccttctcagattctccgacccatttagataacaattcggcaccctttatactgataaaatttgcgttagaatttgaagcgacagcttttgcgatcaaagtctttccagttccggggattccgtataatagtaatccctttggaggtcgtataccggctatttcatatatttcagagtgatttaatagccagtcgatcaaatctgctaactcttctttcaaagaatctaacccacctatttcactccacttgacatcaggcttttggatagagaactctctaattgctgacggagtgacatctttcagagcattattaaaatctgaatcaatgatcgttattttatcgagtaaatcttgtggtaagggtgtttgatcaatattaacttgggggatcaaccgtcttagtgagcgcattgcggcttcttttgttaaaacttccaaatctgcacctacaaatccatgggttagtcttgatacccgttttaggtcaacatcccgaccaaggggcatcccctttgtatgaatatttaatatatccaatctcccatcatcatcaggaatacctatttcaatttctctatcaaacctaccaggtcttctaagggcttggtctatagcatttggtctatttgaagcacctattacaatgatcttacctctagaatttatcccatccatcaacgttaaaagctgagatactatacgcctttcgacctcgcctgatacatcctcgcgttttggtgcgatagaatctagttcatcaataaaaagtattgatggagatttctcttttgcttgttgaaaggtctcccgcagtcttttctcactctcaccataaaacttgctcattatctcaggcccacttatggaaaagaaggaagcgtttgtttcatttgcaactgcttttgcaagcagcgttttccctgtgcctggtggaccgtataacaatacacctttgggtgcatcgattcccaatttttcgaataattctggatgtctaattggcaattcaatcatttcccttattttaagaatcgaatctctaattccaccaatatcctcataattaattctctcaaaggcataggaactattcttcttaaaagtaccaatcgagaattttgtgaaattcgttactagtaaaggacttgaatttggattcatgaaatttaccaaaaaaatgatcttcttccctaccagattaatagggatagtatccgatttggagatcacccgtccatttaacaagttccctagggaattcttgaaccctgaatattctagctcttccaatgggattaactgaacttccttagcctcattgacaattttaacagggctaaccataatatgatcatcaattccagattccagaacacctctggtataaccatcaactcgaattatcttcctgccgtaatcggaatttaacccttcagacagtttgacatatgtaaaacctttctttccccttaatttcaatacatcaccgacatttagttggagctcaccaagtattttcggatccactagggccaagcctttgcccacaaatttgatttcagtttctgctatttttaaaggaatctcatcggtactcttcgtagcaatttaccccgcagatagacagatagaattttcgacaagataaacaatcaaaataaccatgtcacaaacctattacattatgaaataatttgtacattatataaattatttgaaaatatagtaaagtttatcttattctggaactatttattacatgtatgtatgtccgagacatctcggtcccacaggctgtaaaagagattatcttgtcaaatgatttatacttaaaagcagtgaaatccggaattgctaattacacagcaatagccaacaagatacaatccgatgtagaatcagttactggaacacgagttaacataggcacaattgtagtggctattaagaggttcgcggacttgataaataaatcaagatatttggaaaaccaaagatcagaagataagacaattggaaaccatttaaatggaaacgaatttcaagagcaaaaatcacatatatcttcacaagacgctaggatgaaactcactggaagcatcatcgatattgaccttggtaatcaagactcgttcaagaatgtaaatgacttgttagatgaatttacgcaagaaaccctgatggattacaatttgatacgaactaccgaaaaaataaggatagtaactgaagatatgtttagttcaagaaaaataattacatccttaacagaaaaatgcaatggcaagataactgaagggttatcaagaattacaataaccctattctccgataatataacgggaataagacaattgttatttaatatatttgatgttttgaacaattataaaattactctaaataacgttttttttggtagtaatgaaatagttctgatattagaaagggagcaagcaatacgcgcctatgatttactacaaaagaaaatttttggaaattagatagtcaataaatattatatccgttgcaggcacgatcagatatccctgattctttatttatattcttaaagacaaataaacccgacgaatacaaggtaaagccatgtcaaagggtttgaaagtgaaaacaggtgtatgggatttgtcagaactcttgaaggatcctattaaaaatgagttcgacaaatcactgagcgatatcaacgctaaagtagcaaactttgaggagaaaaaatcatctttaggacatgatattactacaactgattttatgaaattaatcaaagaatccgaagaaattgcagaatctttaagttatgttgctgggtatgctcatttgaagtatgctgaagatacatcttcgaatgatataggcgcattagttacaaaagtaaatattttttcctcagaaatatctaacaaacttctattctttgatttatggttcaagaaagcgttagacaaggaaaatgccgatcgtttaataaaaggatctccagatgtttacaaagattatttacttcatgaacgttccatgtcaaaatatactctgaatgaatcagaagagaagataataaacatacttgatgttacggggatgagcgcgttaatcaagatttatgataggatgacaaatggttttgagtttgagtatatcgaagaaagaggaactagaaagataagaaaaactattactaacaaggaaaagctggtctctttggtgagaagttccagatcttctgaaagagttgctgcctatagatcgttgttgtcaatgtataagaaaaatagcggagtcttgggcgagatttatatcaaccggattttaaactggaataatgaatacgtcttacttcgaggcttttcgacacctatttctgtaagaaacctatcaaataatattagcgatgagacaatcagggcgcttcttaatgtatgcagatctaactctaaagtcttccaccagtatttcagggaaaaggcaaaaatattgaaggttaagaaactagagagatatcatctttatgctcctttgaaaacgcaaaatcagaagaaaattactttcggagaggctcttaagatggtcttggatgcttttgatgattttcatccagagtttaagactatagtacaagatttggttactaaaaaacatatccactcaaaacttcaggacaataaacaagggggagctttctgttcaacaataagtcctaatgtcgacccttttgtactcttgaattttgacggcactttaagggacatttcaactatggcacatgaatttgggcatgcaattcacagtgttcttgcagcggataagccaattagcgtacagcacccttcattaccactagcagaaactgcatcagtatttggggagatgatacttaacgatcggcttttggatcaggttaagaaaaaagataggaaaataatgctagcagaacaaatagatgacttttatgcgacgattatgagacaagcatattttacaatttttgaaatttcagctcatgaaacgatcgggaaaaacagtgctacaaatatagacgaattatcagaaatttacatagataatttaaaagagcaatttggaaattcaattaagatatctgatgattttaaatacgaatggttgtacattcctcatttttatcattcacctttctattgttacgcatattcatttggaaatttgttagtaatgtcgttatatcaacaattcaagaacgagggtaaaggattcatacccaaatacattaggattttgtcatctggaggctcgaaaaaaccagaagatttactattagatgaaggtattgacatttctaaagaagatttctggcagagagggtttaatcttgttaacgataaaataaatgagctaaacaaaattaaataatatccctgttcattcttttattttatttcataatacagcatgattacctaattgtgcaaatatgatcaattttatcttcactagtatattgtaattaaataaccgctcaaatcaattttaaatgatatcatggaaatatagacataatatgattacaagtaagacagataattagtttggtttaccatgcatgagataatcatcattctcaaagagaagaacatattcggtagcaaagtgaaaatgccaaaactagatcagtaagtgttcatgactaggcagccaaagagtgtcaaagtaagagaaaaagagaaatgatactattttggaatgactgaagtctttgagccaacattttcctttgccaaccactttttctaattatttcctagaattggatgcggaataacatatatggacagacaagtatgggctcaaaacttggagtacctgtgtaacaataataaaatagagaagtttgtaaaaatgtcgcgtatccggccagaaaattacacttattcaaaccctggaacagttttgttagggatgatgtatgaagccagggggattatttccctttgaagatccccatcatcatcagtgtcaggaattgtagggtattcagtcttgttattggcgtaaattaccatggtgattattctatcatttatttttaaatcatcaggaaatttaaatgagacatttaggctttcattgcgaatatcccaattttctgcttcaattatatgataagattcgggttgaacatattgttcataaaattctaatggtttacttacgattagtcctaaattacccatgctatagtttaatttatttttgttcgcctcgtactccccatggttaggtgggttgtcaaaatagaatgaaatatgacttaattgcaggttttttttcggatcaagcaattttgcttcgaataaaaactcattgtctccatttgagagattgtaattcagataattgttttcaaaattctgaacaagaacaaaataatattcattaaatgctatcccgatacttacatttgtatgaagtttatccaaaatattgtttttatgaccattgtgacagcacaaaaaatcattgaagatcatagaattttctagcttatcaattgcatcaaaaggatctagcggctcacaatataatctgaaatcactggtacaaaaagaatgagcggttattcctttcatgacatcatcggtattaatatagcttatttgacctatgttttgttgtacgtaaccagtaccattatgtaaagaatataacatatagggttttaacccattcttgctccaatgagataaaagctctgattgtagtatttcagctgcatgatattgagcagccttattatcacttagagaaacagggctgagtccaacactcaatcgatctgcatttatcttggataatgcatagtcctgcaatattttcaaactcgaagttccatttatggaaaaagcttgatcaaagtcggtagtataggccaagtgaatgagaatcatcaaaatgttagacagtacaacaataaggagcatttcaaatagttagcaacaggagtcctgctgctttcccataatgatgcgacagccagtccgtatatgaaaaacccctacaatcattttgataatcccattttgtcattctggttgtcaaaacgatttcgacccaccatttgaaacaagaatgcagaagttattaaaattaaagatacaacaacagctgagagaatctgagatccagggatccccaataataatcctagtaatgaggatactgcaaagataattacaatgatcggtatccattttttaagtaatatctttttatcaaaattaatcatacaacatacaaaggagttacataacaaattaagggttacgggtaacaagaggtgatagcattatacttataataaataacagaatttaatcaataagttcgattatcccttgagttagcatgatcctacgcaattctttagctaaatcagtgacagtaatgatccctattacttttccattggctataacaggcaatcgccttattcgattattgatcattcgttgaaccgcaacatccacaggagtatctggtgctgcataggtctggatcttggacattaattcagatatcttcacttctgatgacactctatcattagcacaaactcttttaacaaaatctcgctccgtaatgattccgagaagttcatcattatcctgaactatcagagagctaatccttttttctttcatcagcaaagcggcatctaatgcggatttatcagaattaattgtaacaacatgactagacatgatttcacttaccacttcttgcataacagtttcttaaccattaaataaaaaaagatttctcttagtgatcgcatgtcaacccttggtataaatttttgaacaaggatatagctagtggttgatgatatagatttcacaaaagatttaaaaataattgtgttaaattaaatacatagaaatggaaagtaagaactttttcactacaattttgaataaaatccgtctcataagagcatcaagaaagcataaggtaacagcataacttatgcaaaatctaatgttttgacaaaaattgtattataattttttctgaaaaataaaatattgtttaaataagctacgagctttaaattcttactagtagttttcaaccaagactattacgataaaattacaatttatgatggaattatgggggaaaaaaaggttaaattacttgccacggtcttgtagcaaatgttactccaagcccagcagcaattattatgctctgatatattatgttgttccacggaattggtttaagtattggttcaccaactacctgaacagtttgacctggacccaaacctggacctacgtttgcgagattgagttgggtgtgaacgtgataaatccctggttctaatgcctttgcttcaatttggtatggaacggtttcttgtggttgaatttcaaggatgtttcctggtgggtctcgactaatgaattcccatctatttccagcattagtagattcactgaaaagtgatatccaacctctcattggtctatttaccaaactttgaagctcgcctgtaactaccaatgtgtcaccagtgtttagagattgcgctgaaaaagcttcatcgttgattctaacgaatctactttgaagctgagcttgaactccgtgaccatcagccattggaagtagtgcaataatactagctaatatggatgctcctgcgataaaggttacaattagaaacaccatagcgggtttgttgccgctcttattattcatctagggattcaacttcttacatagataaaaagtttgctgtatcatctgttcgttaaacatcaattttttacaacaataatcaaacattgtcgaaattctataacatacaaaggcttatcaccgaattcgtattagaagatgaaaaattatgtaaatgaaagatccatcttagtgaatggatactaaaagaatcataaaaaagattgatttccaaatacaaatatagaatatcatgaacataggttttgtgaatcatgccatgaacccccttaatggcttttaggacctgatttaatggtaataaatgactgaaggaagaacaatatttggatatttcatttaaagtagttttatctttattatgatactgtcaaccattgtttaggattttgtctgggtatagtaagctagttaatttttgagactttgcaaaatttatgtttgaaaaagcataataaatggaaagtatatggttttacaatctatttgattgaatcgatctgagttttattgtgttcaaggttataacaaagagaatcgatttcttcatcctagacatggatcttttcactcgaatcaattagtgtgaataatctaacataatcatattcccctggtaaatttaactacaagttctcgagcaaattccattccaactaaggtataagtattaatacgatgatctgattaaaataggttattgaatcaaggaactgatttccagttaaatgaaagcgaagatacagttttgtgtgatctttgtggaaatgttcttgaggcttgcatgtgcgtatgcccctactgtggaagaggagataaatgcgagtgttgtcttcatgactcgatgactggcggttgagtgagattcccaatcatgattgattgaaactataataagaacaggcgctgatattaatgtaattaatggttatttctagagagtccatttcttgggttataggtgggcctcaaggaagtggagtagattccgcgtcccacatatttttaaaatcgatagcgatgtcgggtttaaatgtatttggtaagagagagtaccactcgaatataaaaggagaacatagctacttctctgtgagattttcaaatcaaattgtaaggtctcctgttgatgatattgacattcttgtaacttttgatgccgaaacaatagtaagacactccccattcttattagaaggcggaatattgatttatgatccagatgttgtaggaaagaaaattgaggatatccataccctagacaaatcatccgaaaagagaatatcacatatcttaaagagcaagagcaaagaatatagtcttgcaggaatagtagaggagctcaaagagaggaaagtcatactggtaaaattaccatatactaaattaataaacaagttttcggagtcgattcaagatcattccctaagcaaattagcaagaattaccaacgtaatgtcacttgcagcttcactggcagttttagattttgatattccccttatggaacaagggatactagatacatttgctaacaaaccaaagatagcagaactcaacgtgaaagcggcaaatttcacttattcttatgttaaggagaacttcggtgcgataccagaaaaattttcatttgtatcaaaaattcaggacgacgcgaatagtaattccattattgcacaagggaatcaaacttcacctctaggaaaaatggtggccggctgtagatttcaaacatactatcctattacgccagctaccgatgacagtgaatatctagaatcaaaccagattctagatcaaaacgataataataatggatcagtagtagtaattcaaacggaagatgaaatagccgctataactatggctatcggagcggctttaaccggtgtacgagcctgtactactacttcaggtcctggattttctttgatggcagaagcattaggatgggcaggaataaatgaagttcctttattggttagtttgtatcagcgagcaggaccgtcgactggactacccacaagacaagaacaaggagatctattattcgcaattagtgcaggacatggtgaatttccaaggatcgtatattcctctggagatatcgaagaaagcttttacgatacaattagagtattcaattacgcagatattttccagacaccagttatccacatgttagacaagtatctttctaatagcatcataacatgtagcccatttgaatataaaaatctgaagattgaaagggggaaaatattagagggtaattcaatagagactaagcaacaaggcttttcagatcactttaaaagattcgaattgagcgatgatccgattaccatgcgcgtaccgttaggcacagaaaatggtatattctggaatacaggcgatgaacatgacgaaatgggtcatataaccgaagacccagagactaggattagcatgatggaaaagagattgtctaaattagaattaatacagaatagaatacctaaagaagaacaaattacgatcgaatttgaaaataataaaagtagtaatgtgaaaagattaatggtaatagttagttggggatctacgaaaggagcaattctagattcattagaaaaaataactgaatcagatgatacaactcaattcttgtaccttcaaatcaaattattaaatccttttccaggaaaacttttggaagacatgataaataataaaatggaaaaatttaaaactcttgacaatgcatcctccaacattgaaacaattataacaattattgagatgaactatttgtcgcagttagacattctaataaaacaaaatacaaacttgcattcggatcataatatactaaaatataatggtaggccaatgtctcatacggaaatttacaattctttaataaacataatgaataaccaatctgaacggagagttgtattaaaagatggagtataaattagccgattttaagacaccggttcataatgactggtgtgcaggttgtggagactttggtatacttaatgcaatacaaatgtctctttatgaattagaaatacctccacatcaagctgcaattttttctggaattggatgttctggaaaaaccccacattttatcaatacatttggaatacacaccttacatggcagagtattacccttcgctcaaggagccaaactggccaacccgaatttgaaaattctggctgtaggtggtgatggagatggattaggaataggttccggacattttgtaaattcaggaagacgaaacatcgatatcacatatatcatttacaataacggagtttacggattaaccaagggtcaagcatctcccacgctaaaattaggaatgaagacaaaatctttacctcagcccaatgtgaatgatagtattaatcctatagcattggcttgtatcagtggtttcacctatatagcaagaggatattcgtatgacataaaacatctaaaggaggtaattaagaagggaatagagcatggtggtttatcctttattgacgtattacagccttgtcctacatacaatgatataaacacaaaggaatggtatcaaagttttactttagatgagaataatccttcaataagaattcccaagatatacaagctagaggaagaagggtataacggggtagtggataatgatgatgagtcatgtggcaagataatcaaagcgatagaaaaatcaaaagaatgggaaaatagaattcctgttggggtattttatgaaaataagaatatacccacatatgaagaaagattacaaagcagaattgacaattacaaggaatatccaccagcactgcaaacaataaaagatgaaaacgggaatcctaatatcaatatagataaattgattgatgagcttaaaacaaaataactttttacctaattcgagcttatcttcaaaaatttatattatactatttgagtaaagtttgcttctggtgaaaggatcattctgtcctcgatgcaataatctggaaaaactgggtattcatcaaagatagaaatatttttccaaatgaatagtagtcaaccgctgtgaaattcattacgacttaaatctaccagcggttgagataacctctggttatttgacaccattataggtaatcctcttcgacttcacgatatgtaatcaaaaacctgaaataattgtttgatttttatttcaatttgaatactggttttgtgatgtgaaatatgtcaatacttttgtactttgttagtaattttttgtcatatttgactattatgtaaatttctgtcactagtcagtgtttttataattttcttcacggattctaacattctagagattaagacaaactaattaatggttcaatgtttttttgctccttgcaatcatatttcaggaccatggatactaatgttatataaatagaattcattatttacagatatacttttggttaattatgacggtactggtatctcttggtgtcgcttttgattaattggtcgagaaaggggatggactccacacttaacatatcaatgaacccttaaaaggaagtttgtttttcgtcccttcaggtgtttggacgaatgtatgctaatccatggatgctctaatagagtcctaagttatgaggtgtcgggtccaagatacccgtcttctttcattataatgaaattctggtttgtacgtgcttctagaatattaaaaatgatgatctgttctttcatttttttatgattacaagcaattatcttttaattgcaagttcctttgtgatagatccaaaattattagccaaagaataatattccaacatccactcttaggaatgagaatataactctggatacccttcatggaaaacaaaatttggtcaatttaaaggtagactttatcaaactctatcaataccctaacaaaatcaatacattgataatccccacaaattcggcttaaagttttgagatttttaatttttatgtaaatagtcttaatttcttaattaaactctatgatttgtaaaataaaaaaagggatctagtcccacttactccatgcagccatccatctataagtccaagtgttgagttttgcacccaaagctgctataggtacacaaagtaccgctccagctcctgctcccaacgcgacaggactgttatagaactttcctacctgtggttcaattggagtcatgtatggtggtaatgtgggtctaggatatttgaatgccatttctaatgggtcagcaaccagcaacaagttgatcatattaaacagtgggagtgacattcctaccaatacaccaccaattaatattgccgcgtgtttgtttcttcttgttgcccagtacgccaaatccaataacatagcagagggtatccaaacaggaaccgcgacaaaatcgtacgggtatcccaatgcgaaccatgctcctttggcaacccatgtataaattgtcataatagttgcataatacgtagccgtgccagggacaccggtaaacaacatatagtatatagctcctaccacaagcattgtggattgagaaatcgagaatacgacgaatgatgtccatgcccagtcagtatagaagatgtaatctcctgcgttgattgtaagcaacgtactatttactgcaacaacaactatgaacaaatagtgagttgtacgtcttaaccagaccattattatgctgttcttataggtagtatataagattttgtgtatattttttcaaaaatctacaattactatatcaaataatttgataatgactaattcaaacctattaaaaacgtctaaaatttttgaacttaaaaagataaaatggaggatattacatccttactggtttttcaccagctattttcagcatccaaatcatccccaaaacttcaataacggtcaaaacagatagagcatatatgccacttggtaacggatatgcccatggatacacagtaacaccaacatagacaccaccagctgtagccacccaacataatataaagcctaaaacaataatacctctcatattttcgactctacggccgatcatacgctcgatttcgtctctgcttgctcctgaagaaccactactgccaccaccactattactactaccactactactactaccagatccagtttgtgcactaggtttatacccttttggtaaagtcattatttgtaataaagacggttcctttttaaattttgctattgaatttgacgaactaagactagtaatttgcaattatgattttctgcataatttagattagtcataaaagtcttatttgatagtagaggataagacggcgaaaatcaaaatttttttaagctgaaatgtttatcattattgaaaaaatatacctatatatcgttttatttaataaaaaaatgtggctatttcattaatacccgctaatagagaaatgaagggtcaaaaggtctcaacagaaggagacaacaaagttgtaagagggagtattctagtaaaaagaggctttgcccacatgcaaaaacacggagttattatggatgtaacaaatgttgaacaagctcaaatagcagaagatgctggcgcggtggctgtgatggttttagataaattaccttatgatgttaggaaggctggaggggtagcaagaacagctggagtaaaaacgattgaagagataatgaatgccgtttcaatacctattatggcaaagtgtagaattggtcattactccgaagccaaaatgctcgaaacttgtggagtggacatgattgatgagagtgaagtattaactcctgcagacgaagaaaatcacatttggaagtgggagtttaccacaccttttgtaaatggtgcaaagaatttgggagaggcattacgaagaatagaagaaggtgcctcgatgatacgaacaaaaggtgaacctggaactggaaatgttgctgaagcggtaaatcatattagaaaattgaataaggaaataaggatactaagagcggcctatttggataacgattatcaagaaataataaaactctcacgggattacagggtctcaatggagatagcattggaagtaggcaggttggggaggcttcccatagtaaactttgcagctggtggtattactactcccgctgatgcctctttcctgatgaaattaggttgtgatggtgtttttgtcggttcggggatattcaaatcagatgatccctcgtcaagggcaaaagcagtagtattggccactacattttttgataatgaaaaagaggttttggacgctcaaaagatggtagatgaaaaaaaatcacttatcggattagacacgaaaaatttagatcttagaatgcaggagagaggaccttcggtttgaacgctatcctaaaagtgggtattctaagcattcaaggtgatattgaagaaaattcaaacgcaattaaagaatcatttgaggaacttgaaattgaaggtactgtaatctatatgaaaaatttccatgatttagacaaaattgatggtctaattattccaggaggcgaaagcactgttataggtatgctattattcttgcaagggggtcaactagagttgatcagaaaaaagatccaagagggcctaccaattttaggaacatgtgcgggactcatcatgctatcaaataaagcatatgataaaactataggcgaaacaaaacaggcattactaaaggttctggacgttacgatagaacgtaacgcctttggacgccagcatgaatcctttgagtcggaattagatataccttatctgggtgaaagaagattcaatggagtttttataagaggtccggcaatcactgagatcggtaataacgtagaaattattgcagaatatgataaaaggatagtagccgttagacaaaataacatcttgggaacatcgtttcatcctgaacttgccaacgataacaggttccatatcaatttagtaaagttaatggcagaatacaatagatccaaaaaaagaaaatgacaaatgtaccacatacattacagtacaagggtcccggtttaggatctgaattaagtcatcaaattagtagtcagatcaaatggacaaacaaaacaatctatatcgttaatttattttcgtaacctcacctttaatgatgccaaagtttcatctcaaaggttttgtttcaaatacaagaacacagtaccagccaagaaatttgccttatcttttcatagtctgcgaattgattaataaatttaaacaaatcccttaatttcaataagccaaaacaaatttggtagacagaaccgagcctagattttggaataaagataatcaagaaaggtgcggggggtgggatttgaacccacggacccctaagagacgggatcccttatatagatcttaagtcccgcgtctccaaaatattattatttatttggccaggctctacaacccccgcccaactaaagttaattttgaaacactaatatatatatcatgaattgtgaaagtattttaattggcaggaataccgctgaaatttgatttgatagggtttagctcattaaaatgttttagcaatttgtttactttccaaaatcaagccaaagtcaaattatcctataagtatacattctaaaaattaaataccagaaaagaataagaaaatgccgctgaaagatgataaattatttatttgcttagtactagaataaaaaagcaaaatccgtttccaggtatatttagtattcttcaaatatccatatttcatgactggttccaatataaatagttctagaaactcaaccaaatcatagataagaaccctaaaggaaagttttttacccaaaaaacctaatcagatggggatatattgcatgaaccgatatctattcagagaggcatatttcaaaaaaagataatgattataaattaagaatgagatcggattttgaattaagttttttagtaaattcaaaattaggtgggtagactatacacctcacaattccaatcctggatcttgtttccaaaggtgcactctatatctacttcaaaattatcaatatccatagcagagtttattgcctcagacagttgttgttggatcgtagcgctgatggtttcttggttaacaaaagggtatggtagagcaggcaatacatttgtagcatttgtggttggattagaagaattattttgctgcattatataacctgcagtaggggaagaaagaaagtcattaataattgtcgagttaataatgttctccgagttattcaacaggttactacttccactaattatatacgaggtatcaaaaaatggttttatgtatgcggtttcatttacgatttgataagaattagtggatgattttgatatctgcactgaggattgaatattttcctcagagttttgggcatttgaggtagggacacccatactaattaaaagtaataccaacgcaccacccaaacaatgagcaaacgttagactttgttttggaaaagagttaatcttattcaaattatcaataaatatttaaatggcaatataaacattttcggttttttgattcattgattaccaatacaaggaagaggcaggatgtaaatcaaatcccagatatccctcttcaagaatatcaacaaggttcaagactttataaaaattagttaggccttgccgcttgattagttaaattatagaaaatgttcgatcatgaggaaggtttcagactgatagtcgtcaaaggcacaatcttactaatatctatttgaaatctatttatgattaatactttaacaaggataggaatggcataacccaagtatctcgaccaatcatcaacaatccaatcaaatttctcgacaatactctaaaaggtttcaatattgcatcatttaagaccgtaatcaactactatatttgaaatatgccactttctccagttccatcgaatttagaggggttgttatttcatggatccataaaaacattggattaatagtaagtgggatcttgaaaagatggaatttagcttaaaaccatcattggataatatggaaaatgtaaatacagtttccctagaatctgttcaataacttcatatctactagtaccaagttaaccaaattgataagttttctattacagacttttgacgcaaaggaaataaacagattcgagatcacgggcacgatattgcatgtaattattcaaattggcgaatcaaaaatcaacataccaaattcctgtcaaaaattccctatcaaaaaatgaaaccgattcgcaattttctaaatctgtattgaaacagctttaactaaactaccaaaaaacgccaagaaccggaaatacgtccagaagagaaatgactgatgaattttgcaatgatgtggttacaagaatgtagtaagtgttctagatattgtttgtaaccacgagtatagttactcataaaaaggacttcaatggtggaatcaaaaagactagaagagggacaatctgataaaatgaaatcaaaatgcaaagatcatatttttcttttgtccattcctgaaaagaccaaaccacaaatacaatagtatttagacaagtgactacagaaattccctctttgaagtttgcaaatcggacataatgcctatgaagagacatacaagtgaaacgaatgtgaatcaaattaggtttaaaggagatttgggagatatcatgaataatttagatatattcaatgatgtttgatcctatgctttcttgtaaggataatgttttcgattaatttaaatcggatgtctgatcaaaatgttaaaccaaaatcaacgtttagattagttctgtgtaacctagtttgactgaatggtcttgaaatacaggtagtaatattttgatattacagtggagaaatattcctatcctcagatagtaaaacttccacaatgtcagttagcctttttccctaacccaagtaatagtccatattattggtttagtagagatccagaattaagctttttcatttgtagtcatggattctagctactgaatacgttattgacattctcatacaagtaatcagtaaacacttgtgtggacctcatcaaagaaatttagtaatgttctagtaattattggcaaaaatgatatttgttaggacacaatgcaaaacctttaccaattgttaaatgcactagaaacgtagtcataatacgaaaacagagaaagagattcaggatatgttaaatgaactagaaaggttttgtgctaatttaggtcatacaacagaagaaatgcagggagagattcaaggtttaaagtttgcgttgggccaacttggacaggaattgtaactttacatttatacatttctaaagcaaagattcattgtgaggacttttttgctagtttggattttaagactgttagtcattctaatttgatacacagatttactttgcgtaaataatatatcatacaactacattcgcttatcaatgggctgaagcattccttcatttagacagttaattgatatagagcggttgaattagtctaaatttaggaaaggactaccctccaaggatgagagcgaagcgtttgatactatatttgaaaaccccactctgtatactcgatatctatctaatgccaacagacccatttcaatagagcttattatgatgggtgctttatttcataactatagagcacttttgaagttaaacaaagagagcaagttaaacgaaggttcaacaaagcagaaagtagccaccttggaaagagagaaacccgtagccaaagcgttgtttaataaaacctgcgaaaggtggcgcggtctactatacgcccttcataaagatgatagaaaacagttgcttaagatgttagttgattgatgtaatatcttgaatggggggcgacaaaggttgagccgggtagtgaaatctttagtgttcttttggatatagatgtccttgataacaatcatgatattacaagatatatctaagataccataactacaggaaaaaggaagtatgaaactattcgaactagacaaactatataactttaacctgtaagatggtgattgtatagtattagaacaggaacatcatctaaacaaaatcaggtatctgcctaaagactcggtcctcctaacaaaccacccagaataacaattcaatgaaattatgtgtcctgatctctacatggaattaataaacggaaatgttatagaagcgaaaatcagtatataatgttggatgacttcatgtcccaaggcaactggtggtgtactaagatgaatataggtagtggattatatggtcctgccacaaatgtaactcctaatggagagaaacactggcctcctctcaatgagagaacaaggacagaatatagggataaattgtggctagatgaatgtagagaagaacatatgtttcttttttggataactaaatgtaaacattatagtgtagaatactatgaagattgattatccatctagaggaatattgagtttgattcggtgttcgacgccgctaaaagttttagaatgtcggagaaaaaagtatgaggcagcgagaaccataggattgacaaaaggatctcattagtagctaaaattattgtgtcaatcaaatacggagactaagggtgttttctcttatggcatttatttgctacctttttaaggaacgagggagttgagacagaaataattgatttattacaaggaaggattagcagctctatcttcgcaaggcattattacaggccaccgatggagaagtttgatgagattggaattaaattaaataaattatatcaccaggttgtttaaaattaaaataattggataaacgacgaattgatcttaatcaaatgatttgttaacataagataaagatttgtagatcttatagaaaggatttacttcaaggaaggataagtagctcagtgtttgtcaatcattactatagaccagatattaactagattattacaagaaggtaaggccggtattggatgagttgatgatggaattgcaaaattaagttcgattaatggtaatacttttaattaaatctttaataacatctttgcaggatatttgtcatgaaaagcaataatcggatggttttgcttagtataatcatgggaatagtagtaggattgatatatggtccaatttctatacatcttatattagcagcaccgccacatccttgttttggtggtgctcaagactatatttgtatttgtgaaaataatccagctaagctaactgcgaaatgttgctggaatgatccaattactggaagttactcttgtcagacctgtgaggtcaatacagatacaggggattttgagaattgtacaagtaaaggaaagcctgactctagtgtagtagcaccaccaccttcaggaaaggcaccaccaccttcaacagaaaagtgtcctgataactccgcagtagaccagaatggtaattgtactcctactactcaattgcccgatgatactagtgacaataacaaaccaaatctcagaggcaacatactaaatgacatgatgtccactcaaagtcaagattcttccatatctgaggacgaagaaaaccaaactaatggttgaataatgtagatgatgaatcgataacccttctcttatctaccgcatagtttctctttctcttattttgaatctgagccctttgtccatatcaatttgctttatttagaataacctttgaacaagatagtaaccagagcaaagagaattatctagatgtatgatatgtttagaacgaattctttgactcctaaagtttcttccactcgaacaaattctttataaacacctttgtatggtatttgttatgaaatacattaactacatacttttgttaatgtctttatcatttctttatgctctattaataactactaattcgccattggtattacaaacgcaaagttggatatatgctacttcctcagaacaaaaagacaacaaccaggaaaaagctcaaacttcatctgtaaacgaagatagtcccgatgaagtaagtgatgaatctgaattatcacaaggagatataaattctgacggatccgagagtaattcaaatagaaatgatgataatgatgtttcctcaactaaccaaaactccaattgtcccaacattactgaaatctctaatcttccactatacctcggccaagatggatgtcaatatccatgtccatcttttgatagcaacgacgagaataatattccagaaggatgtcccatagaaccattaacatcacaaactaacaccggtttctcagttaaggaggagaacccaacgctatcaccatctcaagaacagcaacaggttgaacaacagcaacaacagcaaaatagtcaggacagtccaaaccaaaatgcctttgttagtccatcaattaatagtgatactagtactacagtttctaatagtgaaagccctactactcagaaatcctttactcctggtggtaaacttagaagtgggtccacacaaacagaatcaagtattcctttgctttcaaatgatgtatccaagcccaggccttcagattctgggaataaggaagttgaaggcacctcacttgtccaacctagtcaaacagaatcaagtattccttcattagaattaggatacaaccctgcaaaatcattgaattttactcccactcagaggatgggtgctccgcttgattcaaaaagtcaaacagagctgagcatccccggaaaagcgaatgatctttctggacctctgaaccccggcttaggtcaaattcaatctggtattactttacttccaaaagacggctccaaatcattgacacctggcgctggtaatactccggtagagggaattccagatcaaccaaacattaaccctcaaactccagttgatccgggaaatataccaacaacaattcctgaaaaggcctatctcactgtaatcacaaaaatgataggattttacaccgggtatctcaaagtatctgattttgagatatgtgtcaagtcaacagttcagtccaatggaatctatagagatgtagacgccatcccgaggtgtgctgacggttcagcttcaggatccaaatatactgttcaagctcctgggtcagtcataatatgggtaaataatttagacaagctcggcactacatcattaatgatagaaacaccaaatcttaacaaccatatctctgcttctgaatctaaaaccagtaccatctacatatcaccaaattcaccacaatgattattatatagaagcactacgttattgaatgaagaaccctgtacctatttcaatttaagcatcctgattaaagaaaatataatatgctaaaacaaaatatcgactcattttctagcttctgaaaatacaaactgagatctaagtatcgatgatatgagtgaagcttattatatataatgtatcattaattgataacggtctacttcgtttaccccttagtgtcgtcatcttgttcaaattccattgatggatagaccgttaccataatttgcgtattggagtaggtatttctgcccttgtatagatggagtactttaattttattgtcaattgacataaagctagtgtattcatttgcaaataaatgcaattatcgattatatgtttcaccatcgttgagatattgcatagacctatccattcaattccgatatgtagttcacaggatatgcttacgcagttgatatattattagaaagactttttacttcattccaatatttttcgaacattaactcgaatcaataccttgtgttcctcatttgagtatgttgcaactagtttgttgtttggatcatagttgacatgaagcacgtgtttactatcaaatattatgaccatttcatttatttctgcaatcttattcgtgtatccgatttggattggattgacttgtgttgacgcattaatggaagcaatttgtcttgtcaaatattcgtctacatcctccatgagaattttgattgatgcttctttttggagtatctttggtaaataatcaataaatttacctttatttaggagatagcaaagaattttgttggatgaaaatgtagtcaggtccttcttacatgttatgagcaacgattctacctctccttgaatattttcaaaacctgacatggttttctgagtgtctcttttaacttcatactctaattcttttattcttgtagaaaatggtatggccatactccacaattcttcaaacaattgcatttgtttttctgctagtagtttagaattactaaagtatgtctgtagagactcgtcatcctctttatgaagaacaaacgccatgtatcccttctcgtcacggatcccaaaatttcccctcaatccatctaaatgtctaatttctacgaaaggtaaggtattaagaaatccttcattttctgtattcacttcagtaattagtctacattttatgccctttcctttgattctctgttttactaattctaatccttctacaaaatatttggaagcccatttacacatttcagcatcccaaactgtgttatatcctaattcggtcgaattcaatccatctgcgaccatttcaagcactatcttataatcatggataacgtcagtaattacaggatgataataattggactcttttaactgcttgagagttatttcatccactatattgtattactagtccattttattaaaaagttgttatatttatttgagttctatttttagaacattgggtcttgcatgagcggcgtggaaaactagagatgcgagacccttatggaattattttggagattagacattactaatatgatgagtttaaaaacgccttgtattgagagtctttattcactctagttactacgcactatagcaaaaagacaatatggtagaataaattgtgagaggattgattacgtggattggtttattctattatcttatctcccaaacactatctgatgtattgccctcactatctacttcataatcaaagaatcccactttattatttaagttggataattctccttcagatgatgtattaaagaataatgagccttcaaatctgacatcgccttctgggtttgcattgcctattccttctgctgtccaagttaccatttctccatctgttgtagtagatattccgtgtccttctccatgcaccgtcccgttagtgtagagtgttgcccaatatgtgccaaggttacgtgccagtatatcaccaaatatagtttggtttgcaacaaaagttgtttcaattactggatgaggatgaacttcaagaactctttgatttgtgattttaccttcttcttctatgattaataccacttgaggatgaagacttgatgagtcttgctgttgatccgttgctaaggtagtgttagaattgttgttggaggcggaggttaagttagtactatctatctgagcaaacaccggagctacaatattctcaaatagattaattccaacaaatgtcaacacagatacacttaagccaatatagaattgtgtctttgaaatagctattttacttgtttttgataaattgcgtttcattgcaaattaatcacattccttgtatttaagttgtgcttaaagtggttggtttgattgtatcagattcgatttgtttggattgcatggtcttttcttaggcttaatctcttgtttaattgaagatacttaaaagaggggtcctgcataaggtgcgtggaaatctagagatgcaaggcccgactggaacattgctgggagttaatgttaaccccgactatcttgatgggtttaaacaccatgtattgatacacatgtttaaccatagtcacaatacagttttgaacaaggattaattaagatagcaaatactcgagatattgtgaacttttaaataatgagttttgaacaaactctatttcaatatttttaaaggaatctcatctgggtaaatcaaaattgtttaattccagtactaattgatattcctattatggtttttatacaagataacgaagggattcttaatgtacctttagagaaggtttggaaattggttaaagctcattttactgatgcctcaaaaattcatccaaatgcaaaagatgttaaaacagaacaactaagtgaaaccacattcataaatacctggctgcaagaaatcgaaggtcagttaattgaatttgaaatgaaagcaacgctgttctatcctttaggagttgcatttgaagtattagagggaccgtttattggatccaagtattttgtgtattacgttcctataccaaatgaatataacacaacaaaagtagttgctgttggagactttaagtctgcatatgctaacaatgatgaaaaactaaaagaattggttctcaacaactttgaatctgttttcgcagaagatgtcacttatttacaaaatatacaataaccttgtactgacagagtggtgtactaaataccgtttaaaataactaaactcttaatgcaatcttgcaacatggtgaagaattggccttaactttaaactaatcatggttatgtatttctcatactcttcaaaggattaatgatttctatctcatttgagtgaagctgaagacataactgtacatgtgtataacaataatattttgaacaaagaatacatcgtgctataggtatagccaaacaaccattaatgatacaatcaatcttatttcttaggcctctattcgattcttttaaaaatcgtttttcagtgggaatattattaattgaatcattgagatgattattcattccattcaaagtaatagcagagaatatctatataatatttttgctatattattgttatagtatttaatgctgcaagaaacatactaacagtgatttatattacttttaatatttttaatcaaaaatctaattaccaattacgatttctctcagtcatcattttaatgaagatgaatgtactttgtcctcactcatttttctagaaaacctcgagtcctaaattttgtcctatatctcttctaccgtatgccccgtatactaacaaaacttttctacttcattcattttatccagaatctctttctctggcttcataaatacaaggtattttagaattatttcagagataaagcactacaaaaggaagaactgcgtcgtgaatcaatcaaagacatacaaaatagcattatcagaaataaagatcaaatagaagcctttctttagtaatttattgactaaatgccaagtctgcaataaaggacttaattctatctatataagggtcggtgcaaaataatccctcaagttggattgtattgtatcgcttgcgatatctattattcacttaatctagaaaaacagtatactgtaatgcaaaaacagtatactggtcaacgaagtccaaatcatccttcttttcatatacaaagcttcaaataaagccttgggcgggaattgaacccgcgacctttgccttaccaaggcaacgctctggccaggctgagctaccaaggcattttattaataaaaaatatcaacataatttaaccatttccattcaacaatattttcctacaagttcgatggtactatagtctctatgttgattatctagtattgcatcctcatgggctaaccatgagtgaaccataaatgaatcattggtaaaccatgtgttaacagcaagtatttgaaatacctctctgacacccactactcctattttggatttaattaaatttttggataataaatcaatggcaagaagggatagaacatccccataattacccctattagaaatttgagtttgcaacgacaattgtctagcccttcaccactaaatatgggtgatcgaaatttgtaaaaaataccttccttctattttatagtatttttgaagatattaccagagcgaattttcttttacttctgttagagaaaccagttcaaacatttatctctaatttgatacatcgttcatttccaggattttcttcaaagatctatgcctattataatcatctagtagtattttggcaaggtggtgtgtaatatcagtaacacttattatcccaataatgcgattatcggcctctaaaacaggtaatcgcttgatcttatttgaaagcatgattctagacgcggtatcaactgagtcataagtcataatagtaattaatggagaagacatgatctcttcgacaagaactttatcggcataataattctccaaacaaacccgtttgactaagtcgctttcagtaataattccaattggtgtattgtccttatctatcacaattaaggatcctatacgatttttagttagaatagcagccacatcgcgcgcagttttattggaatatgcagcaattgtccatggctccctaaaggacattatctcacttacgctactcatattaatacaatagcgtgtatcaacttcgtataaaaactatcatcttgtcaaatgattttacttctggtgatgcgagtctccttaatgtaaataaaacttcaataccaggttcacttttcaacaataatagcttcacaaaaattaataatctaattttataaggattctctagtgaattttctagaattagctgaaacctttgcaatgatggagaaaactactagcaggttagaacttactgatcatctagtatcaatattaaaaaaaacacctactgatataatcgataaaatagtttatttaattcagggaaaaataggaccagattatgaatcgagcgaattgggaatcgccgataaactgataattaagtcactgtcacttgtaagtggtcattcacctaccgaaatccaaaagaaatattctgatgtcggagatttgggagacgtcgcttataatatcttgaagaacaagatacaaaccacattaattcaacaactactaactatcgaaaacgtattcgaaacattattaaagattaccaatgtatctgggacaggatcgttagacgttaaactcagatttattgtgagtttattgaacaactcctccgatattgaagcaaaattcatagtcaaactaattctaggaaatttaagattaggtattgcaaactttactcttcttgatgcaatagctctaacgtttacaggagataaaaaaaacagacaaatactagaaagagcctataatgtttctagtgatttaggaaaaattgcgttaatactgtctaaaggatcacttgaggatatccggtcgatctccatttctttatttatccccattcgaccaatgctcgcagaaagagtgtcaaatccattagaggccctggaaaaaattaatggcgatgcattagcagaattcaagatcgatggcgaaagaattcaaatccataaaaagggaaaaaagattgaactatttactagaagcttggaaaatgtgacttcaaattttcctgatattgtaaaggagttagataaaatagagaccaaggatttgatagcagagggtgaagttgttgcaattaatcctgctaacaataaatatcttccattccaaactttaatgcggagaagaaggaagtacaatattcaagaaattactgcggcttatcctgtaatattgaacttatttgatttgctatactttaatggtcttgacaagacacatctacccctactcgaacgcagaaagttacttgtaaaaatatttggtacacagcaaatgagtggtaaaattaaattaatagatcaaatcaaagtttcaagatttgaagaaattgaaaactacacggaaaaggctctcaagaatggttgcgaaggaattatggtaaagaaccccagtagccagtatagggccggagccagagaatgggcttggatgaaatataagaaagagtattctggagaagttactgattcagttgatctagtagttgtaggggctttacatgggaagggaagaagggttggaaaatacggggcgttgttgttagctacctatgatccagatagggatatcttctgtactatatgtaaagtgggtactggatttactgataatgttctcctagacataactgacaagctcaacaggtacattatcaaacataaacattctagagtggaatccggaattacaaaaatggatacttggttcgaacccaaaatagttttagagatcatttcccctgaaataaccttgagtcctgtttacacaactgcaattaataaaatgaagcccggatatggtctagcacttagatttccaaaatttactgggaaaattagagaagataagtctgcggaggatgctacaacagtcaaagacatttttgaaatatacaagggtcaactaaagtagtagtaataatagaagatgatttaattacacaaatttacttatcgaaaattgatttgtcaatcgaattaattaaattattttctatgatgagtaaaaagatcaaagtgtctcttagatgcccttccacttaattcctagtcttattggcccgtggccactttgagattagtatcactcccgtataacaaaaatatctaagattagtaaaaaattttaaaagcgctatagcatattagagctgattgatttcaattaatcagatttattgcgaagattgtaacttgtttatggaaaaaattagaaaagaggacagattcaagatagatataattattacttcacccccgtataatattggaaaaaactatagttcctattacgatagcaaaaagactgatgattacttagattggctgtttgtggtagctcaaaagagttttaatattctaaaacctaatggatccttttttctcaatatcggtggaacctctgctgaacctctaattccctatcttgttctaaacaagtttatttctgcaggttataaattgcaaaataccattcactggataaagtctatatccattgaaaaagaagacataggaaataataaccagatttgcaaaactggtttttcgataggtcattttaaaccgatcagaagtagcaggtatttaactaatacacatgaatatatttttcactttactaaaactggaaatctaaatttagagaaattgtcaataggtgttccctatcaggataaatcaaacatcaaaagatggaaatcagtagagcaggacaagagagacagagggaatgtatggttcatatcttatccaaccatccaatccagcagatcccatcctgccatttttcctgagaaactagctagtctttgtattaaacttcatggatattctaataatgactttatagtatatgatccttttataggtattggtcatactgcattggcatgcatcgaacttggtatcaactatattggtactgagattgataaaaactacatcaacatcgctaataacatgatcttagaaaagaaaaaaaacctcccgaaatcaaagtaaccattatatgccatatactaatcactcgagattaatggttggaaagatcatagcagagcaagctgatgtatagacacaataatttgaataactgaccttatttccactatacaaataccagttattgttatcaaatataggtacacaataacaaacgaaattatgtacaggttgagttttatttatttaacgacctgatgatttttgaaaaacatacttgcaatttactagggttcgtatgtacctaatgatcagattgtaaccgcatacagattatggataattctaatagggaatcaaaatattgggtatattatgcgatccatacaaagtagtaaaacatgaaaagtggatatatcgttctgtctttttcaatgacgaatagtaaacaaccagggtgggaaaacaagatataggttcaaaggaatctaaagatagtgatgtacagcacgagtagtccaagattaaacggaattatgacatgttaaggtaaatagagtcagtctgaatagcacattattatcattatatatcaaattttagaaaatcatggtgtctcttttaatttaggaatagacaaaacaataggaggaatagtaggcttccacattctatttttttcttaatgccctaaggattcccatccccataataatataccctattacgattatcccaatgaattggggtgccaaaatttgcgactgtccgctatcggacgatgaattcgtctcattactatcttgtgttgggacaacaaatgacgatatcagcacggaagtacccatgatagcaccgccaatgattaataaaacagttagaagtctagatgccacatttatgccaatcccgaacgaaattacaaataataaaatcgatccaccgccaaaaatcatccctctttctttggctgagagaggcaaaaagccatcttctgaatgacttaacatcgaaacaccgacatcaagaatatatattattaatagcgcaagtgccacagatactaggacctccgatgctatttttcttgttccttgcatgctatttattttcacactggttatttaattattaattagtaaataccggtttctggtagtctaccatcatctatggttggccaaataatgataatcggttgatcaaaaagtcattatggtggaaaacaaatattttagccacggccaaattaggcaaaatatatcgtcaaaggtaatatacaatactggattttagtttgggatataacaatatgaccatgattagagatttgatgcttccatcacaagtgcctaatcattaaatcagtctaatctgtctttaccaaaacttgttgatttagaattaaattaaatttttgtgttatttttgattcctgaccattgaaacccccctaccaagcgaaaacagtgatatagagcaaaattaggaaaaaacccgaatgaaaaaattccttataaatagtgtagcatgtaaataacaaaaggagatattgaaaacagtacctgataaagggtccagtactacttgagataaaaggagaatgtaacatattaggtgtcaaatgcaagaatgaatgcatcggatgggaaagtagtagagtcattccagttgaaaaaaataacaattccaccttatcgataattaggggaaggaattggaatcatcataaccctgagaccaatgagcaccacaaaaattttggaatctcaatttggaaagaccttgtgagaaacgtattgaaacaagaaaaaaagagaatcataataattggaccctccaattcaggtaaatccaccctttcattgtatatggcaaatgtgtttatcaaccatggtttaagacctttattaatagatgcagacgtgggtcagggcgatttggcgccaccgacttgcttgggagcggcagtaatgaatttcccggaagtagacctatggaaggtaaaaacaaattggacgaattttattggcggcattcaacccgtcgggtacgagtctaaaattatttcaaatattcgctggcaattagatacctcattaaagcatgatttgtcgatcataaatactgatggctatataaaagggaacggattgatacacaagatcgatctgctgaaaaaaatacagcctgattgcataatatatcttggtggcccaaatatggacagaaatctactggaattatttagccatcttccaacaaacctgaaaatgaatttcatgtatggagaaaggcaaggagttgtaaataacagatccctcacggaaagatatgcgaaaagaatcaaaactttttataaatttttgacaaaggataaagtagtaaatatgaaattagatctttctagaatcaattatatttactataggaatagatttttttcagaaataaaatgcctaaagggatatgagttttcaaatgcaatgaatgaaaaaatattatatgttcccgataacgaatttctaaaaaaccgctttgtgggatttggaaataaaattgataatggcctgatttttggatttggatcgattgatgattttgtgaaaggagttctggtggttaaggcaaatgtcaaagaatttgatacgatcttcttaagtgacaccaaattagatataatataaaagagtcaacgtgagtcatatgtgattggcaaggctttatttaacttaaatatcactattgtaatatcatataatgaattatgccatggtattacaaagtagaacatcaaagtcatgtattgtttgtaaagtggaccttacagtgattaacactaaggtaaacaagaatcaaaaatactctaaatacagagagatagtgtgtaatgactgttttaatctgtactatcctaaagagtgatcgagtctgggatttagaatcctttatccctttgcaaacttatccacgatttccccaaccaagagaagatattgattgataacaatatttgacaaaactatttcaagaaataattactgcactatattctttacaattccatcatgacaataaccactgaataattttttttaaaaattgatttaaatcgatattagtaaatagatagaactttacttatgttaagttttgctttcatgaattcaaagaaattaacagatctcattaaaatcttagaaaagggtgttagcacattattttacaaataccaaaagagtatttagcagtcatctgggagcaggggttagaactgaagaatatgtttgaggggtatgcttctatcacagttactggcaagttgttaaaaaagatcgtcgtggattactcggttcttttaagcgagcctagcaggtttgaaggcctacttaaagatatatacggttctgaaaacaagaaggaaatatttttgctcacaactgcccttagggctagaataaccgatattcgggaatgcaatatctttgataatgatactgaaaataagatttacaacatgatgacaagattatcctcagattatggattggatgataaatctgctgcctgggtgactattgcttggtctattggatttgacctgatgaccgaattggattataataatttaactaatggtattagaacagaaagatatttaatgctcggtaattatgttgcgaatttggatgagggcatccaacaaggggaaatatcccaatgtaatccaatctcaaatctaataatggtgaacgcaactgatctaaaccagttatatgaaaacggaataatgttacacaaccagggaaaatttgtagaagcattagaatgctacgacaaagcactagcaatagatccccagaattcaaatgttttatcaaataaagggttgtctcttcataaccagggaaaatttgtagaagcattagaatgctacgacaaagcactagcaatagatccccatgatgaattcataattaagagaaggaataatactagagagatactactttattctagcagcaatgcgagatctaatcaagttatcggtcaagtatcaaatttgaatagtggttttaaaaagcctatgaaattgtactttttaggggtagtaatagctgcggtattcgtgacaacatgtattgctgcgtatatgattttcggaacagatggcaatcttcaagtaaatcctctagggaacaattcccagttgattaatgatgtatccactaataatatcgatccaacaaatgatggatctgaatcatcgagtattacttctcacaaagaatcaatttcagacttcacaaataatatagaaaaagaattgaatcttcagataaatagcgataaccagtccctattgcaaaatgttaatgaatcaggactgcactctaattctggaagctcacagaagaatgacatagagtttcacagtttgaatggagtgaatcaaaaggtagacaattttaaaacagagctgggtaaggcgatgattagtaacttcaactaataatgaaactatctgtaaaagaaacagatctttaatggtttttatcccaacattaagcggctaatggtctatatttgatatatcaaaccaagagttatatcatcaccactaccttctcgagaggtttgtcttaatatgtcgtaaagattctcgctcaagtatgaatagccgtattcctccaataggactaagtaatccagtccaattttaagaaagccagattcattgttaaaggaattgcaatatccatcggtagataacagaatcaacttcggttttagtgcgtgaaagtcaaatattccagttttgaattctaaccagctatcatccatgcaaagtgattcggtgtgaacaatagactctactgatgatttgtcaccagagtcaccgttcttattggaaaacatattccgtacgttcttgtcattatcgactatcaatatgttaccatcaccaagttgaaaaaatatgaaatagttttttgtaataactgcagttaatagcgtggatccataagcgatctttggattgtcaattattttttttaatatgagtgggcctttctttttcaatatgtggtcaatctcgttatttgaaaaaggatgtttctgcatatgatattggactcgatccatccagttatgaactaatatgcgcggtacagaatatctaataatatcctttacctgagaaacattattaatttcaattggttgattatgaaatagttcaaataaagtttcaactgcaattttgactgcaatttgtgaaccgattttgctcctaaaatgtatatcgctcccatgtccatcgccaaccgacatgactatggtattggaggtgtgagattgtttccatcgaattgaatcttgattcgaattaccagttcgtgaatgtaatgctccctttacacttttgctacacaccaaccacctttttggatttgatgttatacatttatcaacgacttgtgcattattaatttcagtcatagatccattatgtccttagtagcaaaccatacccttagaggtgccaaagtctatttgagtacctggcactaacgagaaactttgttttgaattaacttcaattatgtcaccattagccttgccaactttccaaggatatgtagaaagattcctcaatccccaaaccccgggttcagttggatgtctagagacttctgctacaggatttgagaaatcatatttgcggtccggatctatgtgatgaaggaataatttggtgtcgtgatttaaggcaataaacaatcgatcatcaattagaatattcaaaatgtgagtattcatagttttacattttggattccaacaagcagaattgctttgtaccccctcaacaatgctgctttgtttcgaaactttaatgtcagaattaatgaccccaaattctactggtatctttaatttttcaaaaaccgaataatcagtaacaagaaaattctcagatccacaatgtttgcaataatatatagaatcccgtaacgcgagtagagcaatttgccattcagtttctctgactcttccatgcattggatccttaataccatcggtaaaggcttttacgaaaattcttttgataaaatcgggataaatactccaaaatattaatgcattcgcatgaaaagcaggatcgggataattggaattattgtttggatcaaatatgaaaagcggttcgaatccgtatagtttagacatcgaaggcaagtcaagacttttgatggaactttcaattttaccttctaatggatggtttagaaataaaatataaaacagtattattgctaacgaatataaatctgtttgagtatttggtaacgcttttccaattattatttctggggccatgaatttaggagtaccaatcacgttacccttatcttctccatttattacaatattatctgtatctcctatgcgtatttctccattttcaggatcaaaataaatattatttagagataaatcctgatagcaaaggccttttgaatgcaatagatgaaaactttgtaccaattcaaaacaggcggtcagcaatgtcttaaaggaaggattaattttcctagacaaccacaaactaaaacttttaaatctcgaatctttcatggacattacgtatccaaatccttctttttttggaattttgactagtgccaagggccaaaggaacccattactcggagactctttttgaattagagatttgagtatatcatattgctcattagtagccatggaaggaaaataccactttaaaacaagtggggaattatctggactgattagtgaatataccttaccttgagtgcctgaacccaattccttttcaacattgcaaactatgtttaacccgtttatgtggactggctcacccgcttgaaactcgctcgtagtgttcacttgattggtcttcgaaatcaaaattatttaccacacatcagtagctccagatatcatttgagggggttttggtatatcgacattagaaatagagccgtcatagtatttttgttggcttttgggtctagctgaagctgtctgcacgaccgttgaaacccattttatatattttgtaagtgattctgggttccgcgccaacaacggttgtctttcattgtctccaataaacctttgaagtacatccatgtttgcgtcctcaccgattgcgatagatactcgaattgcctttcgaccccatggttctgacaacaatttttctagaccatctttaaaattatcagtaggttgtccatcagagagcaatactaatactggtggtaatcccctttcagtcatcggaggtatacgcaagatttcagagagtaaaatgaaagcttgtcccaaatcagtttcacctttcgcttcaatatcagtccatttgaagtcatttactcttgtaggggcaataatccattgtgcacctgtagaaaactttaatgcacttattaacaaattcgcttggatgttattttcagattccctttgcatatgagggattgcctctttgatagcataattcaaggcttggatctttccatcatctctcatagatcccgagcaatctacaatccatataaaatgtagttctctttttgaaatttcaccccctggaagagtcataaaaatcaaaaaaaatagagggataatatttataacgatttcacctaatagtatattagatttcttatgatgaattatatttaaaaaataactatgtacctagacaggacaaactgagtaaaaaataaatatttcataacaaacataagttcagcacaaaaaatcagaaaggcctcacacgagccgtttgaataaagaaatccgtggggattaagatattattctgataatagaccaaataagcaagtttacaaagtatattcaaaaaacctctgcgagttaatgacaatattcctgatatttaactaaaaattgatccaaagttatagaaagaacgatactgcaaaacaaacctaatatgaaataatcagatcacactgtcatagttataaataatgttccgactacaaggacattttcaattttttggatatggactagtgatatttttattctgacctatctttactagagtaactcatgctatttttaaaattatttatggattcgatgccttctttccccttcactatcattttgttaatagtcttaccggtcacgtttatcatcgttggcaactcattaacgacgttcattgccaaatcaaggacttgtttgaatgatgtttcagattctttaatgttaccacgagaattcctttcaatcgaatcccttatcgctcttgtgacgtcactctctgattcatctaaattgtaactattggatctggtggtgtctttagcaacattacttttattgattccatcggtattattttcatctttgtagcggtcgaaaacatcttggaccatattttaggaatatggtacaaaatatttaacctgtttccaacttagttaaataataaagctttataaaaaacacaatcaaaagtgagtagggtagcccgttagtaccaacatgaacaaaaggtcccatttcaaatcctcccaaatccaccacgtagacgtaacagcacggctgcgatgccttagggttgctccctcccggacctcacccatttcaacaatccacagtcaattttacaccttcatgtaagttgctgctcatagccatccgatacggcatgatttcatcctagtcgaatgagcgggtatcctcccattcacgaatttacctaacggttactgatcccgacataaagccgattttcggtacggggcacggctagcaccccgatcctacctaccccgacatttgatacctccaattcaaatataattttattggatgatgttattctaaaatcaaaataatattttttttggactggatcctatcatgaacaaaagctaaagtaatttttctagaaaaaatatgatatacggattcttctacatcataccgtccatgcctggaggcattccgcccattccgcctggtggcattccccctccacctgcagatttacttgaagcaattacatcatcgattcttaataacattgatgctacttcagtagcagatttgataatctgttctttcactgctaaaggttcaaatatatcaagtttagacatatctgcaattcgtgagtttcgtgcatcgattccagcccattttgctcccttattttgcttagaccgcaattcagccaatgtatcaatttggttcatgcccgcattttcagcaagggttaaggggataatttccaatgcttcagcgaatttttcagctgccaattgttctctgccggtcaatgtattagtccattctcttaatttgccagaaacgtatgcctcaggtgatccgcctccagctactatcaagggtttttccaaaacatctttggtcaccataagtgcatcatgcaccgaacgatctgcctcatcaaccactctttgggatccgccgcgtatcaagatggttacggcttttggattcttgcatccttctatgaatacccacttgtctgtttctacttttctttcttccacgagatcagcagctcccaaatccttgctggtcaattcatctagattgttgataactcttgcgcctgtagctctggataacttggtcatatcactctctttcacacgtctaaccgtcagaacattagcttttgcgagatagtgttgtgcgatatcatctaatcccttttgacaaattactacattagccccagatccagttattttttccaccatagtctttagcatggtattttcctcgtcaaggaatctcttcatttgttctggtgatgtaatatttaattttgcgtcgaattcggtcttttctatttccaaggcagaattaatcaatgctatcttagctttctctacccttttgggcattccaccatgaactacctctttatccaaaacgattccctttatcaattttgtatctttaatggacccaccagatttcttttcaaccttgatgtcatccaaatcgacctttgtagatccatttcgagactcagatacttgttgtgcagctgtgacaacaatattagccaggtcatctgattcctttgaaaccagtttagtttgcattgatgtctttgctatttttattaattggtctttttcgttatttgttactttaatagcgatactatttaaaagttctattgacttgacagcacattttctatacccgtctacaatcaccgtcggatgaacattcttcgtaatcaactcctctgctttttcaattaacgaacctgctagaacaacgactgaggtggtgccatcccctacctcattatctgttgccttgcttatttccaccatcatttttgcagcaggatgttgaacatcaatttctttcaatatagttgcaccatcgttagtaatagtgacatcacctaacgaatctacaagcattttatccatgcctctaggacctaaactagttcgtactatttctgcgactgtttttgctgcgtttatgttatttttctgtgcttctcttcctttagtctcacttgcgccttcttttaatattaaaactggcatcccgcctgctgatccttgttgaattgacatatttccatcattcaccttaaaattatagtttacactgcagtcattggtatattttaaacttacttaaataaaattaatttatttgttgaaaaaataaaaaaaaactaagatagcaaagaatcgtatttgccagaggaaatatcttgatatatctcacttgccaccttatcctccacttttatgcccaagctcagacaggtgcctatgatttcctttgaagatgattttatcgtttgtgcataggaaacatctagtttcatttttgatatttttactataccttccatcgagatattccctacaaaatcagtaccagcagttccagaccctttggtaactccagattccttaaaaataagggcagccgtaggaggtatacctacttctactgtgaattgtttggtctcggtgtcaacttccaccttgactggaactttcattcccggaaaatctttggttttttcgtttatagtattaacaacctgtaaaatgttaattccaagtggtcccagagcaggtcccaaaggtggccccgcgctggcttcgcccccacttactaatgcattcacaacttttttttcactcataagatattacaaactgtctaatgtaaaaaccacttataattctataaagactttttcaaataattagcatcaacagttacaggtatctgatatggagaatcaagtaatactactgttgcttcctgtttttcataatcaactctcattattttggctttcatggatttgaatggtccagcaataatctccacggtgtcatcgataattagttcggtaactactggtttcttgatgagataaccctccagatccttaaatggtagttcacctcttatttgtccccgtatatgtcggattccatgcaaagcctcatatgcgatatttgagtctactgcttcaacgattacgtaacccttaaaattttctaaaaataaaaccgaataaataccctctattttctttgaatgtaatctagtctgaagcatggatgctatcatgctttcttgaccaccagccaccctaacaacaaaaaattttgaatccccttcctcttcatttgacaacagagtggtatcctcagtttgactatcagaatcttttgatcctttctctcgggtatttttagattccttagcccctaaattatcatcttttgacctctttgtattatctttattggtagacttgatcttgatcgattttttttcgtgctgacccttatcaagatcattgaaagtgttaattttttcgttttcattattatcattcaagtctatcaaatccaaatcatcatcgactttgtggaggttttttggcatacttatagaatcattaaacgtatttgttttggaatttataagtttataacatttgcttcaaatatcaatttttaatgtttatcctacagaaataagaaataaatctaaatcaagatctctagttcttcttgataggtaagtttacaatcataacctcttccaaagatattgctagttttaccatgctagactatttgaaaagtgaggcagactttgaagactctttttatctcaatgattatgccaaactcgatattgacatgaatcaagaaacaagaacttttgatccaaaaattgaatttcttaaatccaaaagatatcacaacctgaatttagttgtaacagacgaagaattaatttatttaagaaatatcgacaaatttgaaattccaaataatgtattaatcttcttatctaaacatgcatcaaagagtaaaatacctgcattgacatcccactttacaggaaatttttcaacagataagtcactaggtggggcagcatttgagatgggtatcgcataccccagttttcaaaaggagtatatgaaaaatttattttccatgaaaaacagcctactcaaatatgatctcacgattgaatcttctcatcacgggccaacatcatcttcaaatccaatcttgttcattgagatagggtcctccgaagaagaatggaacaacaaggaaacagcaaagatagtttgtgaatgcttaatacaaacgatacaaaatgcaaataaaaaagcgaatgttgaagaattagaaatcgcgataggactaggcggaaatcattatccacaaaaatttaacaatctaattctaacttcgaatgtcgccttcgcatctattgccagtaaacataatttgagattcattgataatgaaatgttaaaacagatgtgggaaaaaagcattgaaaaggtaactagtatttatattgacaagaaagggatgggtagcgaaaaagatagaatattatccctcctaagaacgcaagaattagagccaaagtacatataatttcagcatagtattttttattcctagctcactgaattaaaatacccttaattaaatcaaaaataaatcatcataagaaatctaaaaatatgtaattgaaatgtagattattaaaatctaatcccaagatcccatctaatctcctaaacttagattaattaaccatgcaaataataaatcaagaagcaaaatgaagaaggacgagactcttattgattcaagtcataaaaaaccgtcaatggttgtaacctctgtcttaaaaaaccaaaatgaagtattggttttacgtaggagtaagaaagtcaaaaccatgcaagaaaaatgggcgggggtgagcggttatcttgaaaaaaatgaagatttactctctagagcgttgatagaaatttatgaagaaacacgaataaacaaagatgaattagttttaagaaaaatattcgatcgatcaaatgtacaagaattgacaacgaattgatgataatcatccaacccttctgttttgtttcgagcacaaggaaagtggtactagattgggaacattcagattactgttggatcaatcagaaggaaatggacaattttgatttcgttcccagatttaaagaaatcatctccagatgtcttaaagaactatgataatgcaaactatcaaaaagttagaattgtcgtatttgaaaaaaatagaataatgaaatcctattttagtgagtttttgctattttaaccagttctctaagatgagacaaggaacgcacttgagcaccatttactttcttatacagtgcccaaaattgttcattcgttatatcttttctttcttttaatatctttaaatgccttctcatcgatcgtaccttaataacatatacttcctttttaccaactctagctgtctttttaccttttttggaccctgggccagttccatgttttttcttggttacaagttttgccctggttcgacccctggaagtgcctttaacttttgcggtccaaatggatccattgcttatcaaagatcttatattttctcgtgtgattgaatcggctacatcatctaatttgtcaggttcaaatcttaccctattaaccccaactccaagaattcgggatgctagttctctttttttatgtatatttactaccatttatatcactacttttgatttttcttcacggttgaagatttggatgaatctttcttcacggttgaagatttggatgaatctttcttcacggttgaagatttggatgaatctttcttcacggttgaagatttggatgaatcggatttagatttttttccatttattagcttgatgcccattgactctgcttttgaaattatctcaagtcttttcttgtttccaacagtacgggcaatccgggctgcatccttagaattatccagcagcattaaatccttaacattgtgaaccaaactatcaacataaccagaaggatgtaatccacgtgatattctagggccacggtaaccaatctttaccaatggaggcactcctgagacttgctttctcatcttattgtcaactcctttgggttttctccaggtgacagctaaccttttatatctccagctttcttgtctcttaaatttgggacggtgctctgaaatctttttacgttgttcaaggagatcattattgattaccataatatcgttttattctacttagaataaataaatatgtttccgattgatgtcaaataacccacgatagtgattgtgttagtccaagagtaattatttggcagaatgtaaagctaaagcagcgtatacggaaatggaaaaggataaaaggtttcgtatacacaattgtttaatgaataaatacgaattacctcctcttccatacagctatgatgcattagaaccaaatatagatgcaaaaactatggaaatccattatacgaaacatcatcaaacatataccaacaatcttaacgcagctcttgaaaaatgtcctcaagatgttcagaataaggatataatagaaatacttagtgatttagggaatgtacccaatgatttaagatcagcaataaactttaatggtggtggatttgataatcatcgaattttctggaataatttaaccccgaatggtggaggggaaccacaaggatctattgcagaggcaataactaattcatttggaagtttttcagcttttaaggaaaagtttactgccagtacgatagggattcaaggaagtggttggggatggctagtatttgacccaaagagcaacaaagtagactataaatccatgccaaatcaaactagtcccaggacagaaaatctcataccattgttaggatgtgatgtttgggaacatgcgtattatctcaaatatcagaataaaagacccgactatgtcaatgcttggtggaatctgataaattgggaagatgttaacaatagatattccaaatcaaaataacctattttttgttgtgaaaaatatttattttttttaattgataacgtcgatttttccaaacccttctctaattgttgtgttaacattcatggtataatcataaataatttcagaatatttgactagaactggcataatatcgtccaagttcttactcaagtagaaacctggacaatcccctgtaagttgaaaagatgtatgcacagataccagattcttttcattttgactccatgaaaaaaaaggatataaccagcaaaccccaggcttatttggatggagctgacatgctccacattcatttaggaatctgcaggtaatagggtgtccattgtcggtctcattttctgacggctttctctttaaattaagcatggttaaggtggttattacctgagagtttgaatctgaattggaattattatcccacgttgctacgtaggtttcatttcgtagaaaagatgattgtgaatcatatcctaaatgttttgaaatattggctaaatctctggatgttaagggcaaccgtccctgcttatcacaacagttatgacaatctggccatagacaatcccacaataaaaaaagagatgattcagataaaaaagggatatgataagtaaccttgtttatcttaatcgtataatcgtgaatgtccttacgttttcccagatgtacatctctaacaattggatctatcttccatttttttgagagatcatctaatgcggaggagacctcattaactttttcttctaccccactagaaattgccatgtatgtagaattataaaaccggatgtttaaatgtgactatgatatcaagtctaataataaagatcaaaacacagagaaaatgacattagagaattacaaaggaaaggaaaggaaaaagggaaaacacgcatcgtcgaccgaaaatcgtcggttggtatgggaatacgtaatctggccgctaatattggatgttaacagaaactattttactttacaagaatatcatataaagcgagattgcgtttgtgaaaacaaagaaattttgccttccaaggttgcaggaggatttgtgtcacttttggttaaaggcattttggtgcgcgaaaagaacatttattcaatccattataaattaatcccgtacatgagaaaaaaagttcatctcgattatggaactgtaattagagaaataaataccaagaaatagacaaaattattcattcgttaaaaagtatttccattggattagagataaaataaaataatggaaacaaatatcagaaagtgtagctcgtgaagcccggtcgaaccatgataaaatggtgccgaatctagcggtcaaacctcaaaaggactaaggatctcaggctctggatctggtagagaagaaacctggggacagcagttcgaatctgctccgggctacttcagattgatgtaagaaaactcttttaaatcaattgcaagataaaggattctagttcaaatgaggacccgccttgatgatttcctcagaaatgggttcaaatttcctgaagttatttataaataatttagccaatcttttggcagagaagtcatattgattcttatcatgccaagtatttcgaggatttaatatagaagcagggatgtcatagcaatgcgtgggataatcaagattaaacgtttcgtgtgtttcgtatggaacgtcatctagtgtacctttgagcgttgcagaaaccatctgcctggtatattttaattctattcgtttacctattccgtatggaccgcccgaccagccggtattgattaaataaacttttgaattatatttagtaatcctctctcctagtaactttgcgtattctgcagcttttaatggcatgaaaggggctccaaaacattgagaaaatgtctcttttggttcggtgattcctcgttcagtccctgccaatttgctagtatatccagacatgaaatgatacatggcgccctcttttgataatttagatataggaggaaggaccccaaaggcatctgcagtaagaaaaattatgacggacggatgaccgcagacacttgggataactgctcctggtataaaatttaaaggatagacaacacgggtattttctgtcaaactaccatctgtaaaatcaggttctcttgaaaaaggatcaattacaacattctccattacggaaccaaatttaattgcgttccatatctgtggttctttatctttgtttagattgatacatttagcataacaacctccttcaaaattaaatacaccattatcagaccaaccgtgttcatcgtctcccactaatcgtcgattttcatcggccgaaagagttgtttttcctgttcctgacaaaccaaaaaataaggctgacctatgatctttacccaaatttgcagaacaatgcataggaaatatgccctttttaggtaaaagaaaattcatgactgagaacatggatttctttatttcgccagcataagtagttgatcccatcaggattaaatttcgcttgaaactaataataataaaagtttcagattttgttccttctaactctggaatagatgcaaaatcattaattgacaacagagtaaaatcaggtttaaaattagacaattcttctggtgatgcgttaatgaaaatttgagttgcgaataaactatgccatgctctgtctgtaatgactcttatcgatagcctagaggagacatcagccccaacaaaaccatcgaaagtatatagattctcctctaatttattatcgtggataaattttgtcatacgactaaatattttttcaaagttttcttcagaaataggatgattaactttgccccaatctaccgagttggcagtaatttcatccctgacaataaatttgtcctcaggtgaacgaccagtaaattttccggtctttaccgataacgaaccggtagatgatagcttaccctcatcatttagagtagctgattcaactaataggggaactgttaaatttctccgcccctcattaattgtaaagtccatcttctaattttgcttcataataccaatagttataatctttggggtagattgttattaaagatatggacaataaattattaaaatttttctaacaaaaaaattttttataatttattttattacatcgttatgaaaattaaaaaaataatatcattcaaatccaataaaattattttcaaaatttaattaataatgtaaccttccttaataaaaatcagttagatctatactaaaaaaatattttaatatttctacataacttttcactggaggcggaatttcattttcacatgctattcctaaatctcttgcattaaaccatattattaaactttgtaagatattcaagaatctgtgatgcctagcgtcaaccgtaccaaaagatttgatatacctgtcagctaaattccaagaggccgtaaagtcgatacaatcgcttttgtagatggctctaagttgatctttaatatcaactccaattttgaatggtttttcacagactattattggaaaatcaattttgtctggtaaaaaaagagccgggggagaccatatagaaataatcctagtaccattatccaactctgattcaaattttttagataataattcgtttattttttcatctgtaaaccaagaaaaaatcacggtcgcctcggataaggaacaattagaaacgttttcgttaagggcacaaacatttttgatgattttggttttcgatttgatttcatcaataactgtagcgttaatatctatccccacggccttcttaactttgaattcttctctggcaatctgtaatgttgaaggattgttaccaataccgagatgataaaatatatcgtctctgcctaaatttgatattgagaacatcttcctaataaaatcatcaggaataacaacgctgtctccggttaataccgaattgggcagtgtggatataaattcattaattttcacatatatttaccttgtttgttgctgttatcctattactaacattagatttcgacaaatacgttttcgccctcaatcaccacattgtatgactgctggttttttagtttttggggaaaccagataagatcaccagtttgaacattccacttagcaccatgccatggacagacaagttcactaccttctaatatcccctcatgtaattcagctcctgcgtgagtgcatatattattaattgcatagtattcacctttgacattagctattacaatttctttacccccggcagtaatattttttaatttaccttcaggtatgtttacggccttatccaccaaaaactttgtcatatataactatttcaaaatttagaatattttaaagtatttgatgctttattattcaagaatggctcttattctgtgcggatgaatctcccaatatcttgatcaataaggctttttgcacatgtaaacgattttctgcctcggtccaaatggcagaatgagggccatcgatgatctgagatataacctcttttcctcgctttgcgggcaaacaatgcatgaagatgaaatcttttcttgcatatttgatcaagtcattattgatctgatatttagggaaaaatattttttcacggctgtcgaactcactttcttttccgattgaaatatgagtatcggtaactattacatcggcatcaataactgcttcggtaggatccgatgtgatcaataaagcagattcattttctttagctgatgttctagctattcccaccacccaatctaatggctcaaagcctataggagtagaaactcgaatatttacccccaattttgaacatcctaggagtaaatcattacaaatattattgccatctccaataaacgccagattaatcccttttaatttttttttatattcgaggatagtgagtaaatccgccagaatttgacatggatgaaatagatctgataatccatttattaccggaatggtagaatgttctgataattgttccacatctttatgttcataaactctagccatcaagatatctacatacaatgaaacagtcttagctgtgtcttgtaccgattcgccacgagataactgtaaatcactaaaagaaagatttatcgcatgcccacctaattgaagcattgctgtttcaaaacttatcctcgttcttgttgagggtttttgaaaaatcattcccaggatttttccatttagggatttaagattagaaccttccgccttgaattggtttttcaaggatgaggcgtgatccagtagagctaaaatttgatcagacctcaaatcttgaagacttaagatatcctctttcaatattagttctgaaaaaaatctttaatttaatgctttcaaatagctatttctttttcttaaaccatccaaatcgactttttttctcaccttgatcattcttttcttctttttcttttacttcctcttttgcttgcataggttcggaaattttttcaatttcccctgttgaaatttcatcagagtgcgattcttgttgttcaaaaggagtattgaaagaagacgatgaatctattttcaaatcatcctttattgattttttagaaagacctggtaacgcttcagcgctattttcggctaagagtacttctgaatcccgaccatcttctgaaacaaaatcctgattaaaaactctgctacttccttctaaaacatcactctttaattgattacgcgtctccttacctgaattagtatcttcgatatcaggaaccaggtaattctcgttgggcattgatgttcgagtaccacgagaagaatcaagaagagattcattattgaaaatagtctcaacaaatctttctctattgaacccgatgatatcgtcgtatccttggccaacacctaaataaataataggtttggaggtaatataggatattgatattgctgatccgccttttgcatcagcatctgtcttggtcaggattgcgccatcaaattctgtatatgaaaagaactctcgggcttgattaatagtgtcattacctgataacgaatcaccaacgaatattttgatatcaggtttgatgacctttacaatttttccaatttcatccataagattctttgcagtttgcatcctgcccgcagtatcaattaatacgacgtcaatgtagtgcttgctcgcgtactctagcgcatccctggaaacagcagatggatcggcaccatatctttgagatataacttttatggatagtttttctgcgtgtgaagtaatttgctctattgctccggccctgtgagtatcagcggcagcaatcactattgaaaatccagatttttttagtaaattagctactttggctacagtagtagtttttcctgttccgtttattcccaaaaaaacaattttaaatggtcctcctttgcgttgcttctttgaattaatcgcagaaatcaaatcaactgatcctgccttggctagaatctttgaaaaattatcttttaacgtagatgcaataatttgttcagtagtttcattcttttgtaatttcatacccactaaattgtcttttatttgctgggataaatcatctataacttcttgagaaacatcactctctaaaagtgcaatatttagatcaaaaagactttcatccaaatctttttcagacagttccctctgactgatgctcttcgcagcattagagaatgctcgctttaatttatcaaacatattggcatcccaaatacataatctagaactttagctttgatagattttgagagccgctagtgtgaatgtgagtgagaacgtgctgattcatcatggcttcgcatctgcccaacataagaatttacggtattctgtatttccatcatgcgatgagaaatctgttgtttttgcgttgataattgctttgtagccaattcaaattcctttatgcgttgttctatgaaattgacagcatcatccttcttcttttcaactactaccccagcgccgatgtttaccagaactttttcaagtggataaataagacttttaacatatacacctattcctagaggaactaatgataatgtttcggcttctgaagacaaagactttaaagcctcaaaggagttgtgagactcttcatataaacgatgtaatacagactcctttgatactacatcattataataagcttcaagtaactttgattcctgtactaaatcatttacagtttgttccatgtcaacacctcttctattaccgccatccattgtcataatatgctgttttatatctgactttattataactttggcattattcaacctggatcccgttctagctctttattgaccatcattttctaatgcacttaaataagatttatcaataccaattaggttaagttatgagaagcagatttgagtttggttttttcaaattaaaattatttccgttgaatattccatctttgttcttccctgaaacaaccatcagcgatctatagcttctaaataggtggaactaattaacacattcgcggatttggcacgtcctgtagtaatttatgaccagaccctgtatcacccaaagttcctgcatccgatgatcagcaatcaaacgagtgtatgggaagattgtcgataatattttgattttataactctgatttaaagacaacaagattgtataatttgtagtaagttcgttaggtataacccgaaatttaggttatgatccagaccattaaaaatatattaaatattgtaaaaattacaaaccaagagtgtatcaagtttttattaatggttatggcataattggaagccgattggcaactgccataacaaaggataaatctattagccttataggtattgcaaaatattctatcgatgaaaaaactcaagaagcaatagacaagggatacaaggtttttgtccctcgcaaattaattaaggaatttagaaacaaaaattatgacatttcaggtagtatagaggatgcaataaaccagtccgatttagtaatcgatgcttctacagaaggaaatggaattaaaaataagaggaaatattatcagcctcttaagaagaaggcaatttttcaaggaggtgaagacagatatggcagaaattccgtggcagacattatccacaattcaagagtaaattatgaaaagactttagacaaagattccgtaatccagggtagctgtaatgttacaggaatgggtaaaatcatccagccattgattgaaagttatggcaaattaattaaaagatttgatgtggtattagtgaggagatgggccgatctagaagataagaaagaggtaagagattcgatagagtgggataaaaatccacaccaccaggacgatttgaaagatttcataccctctgccaatttgtatgtcgatgcattaaaggtcccatcaaaaatgatgcatcttcatcaaatgacaatcaggttcaatgggagaccaccatctaaggatgatatcctagataatttcaaaaatgaatttggagttgctattttgcaaaatgcaaagggcacaggagacataagaaagaaggctgcagaactcaaattcgatcatggagatacatcaatggtccacatccatagcgagttgataaaaatccaagaggatacgttgaagatttcatattcagatgatcaaaccggaatggttattcctgaaaactacatgttaatacaatcaatgttgttgaaacgaccccgagcatatgcaataaggcaaacagataaaatatttggtatgaaaaagaaaaagaaattactggaatcggaatttcaggactaaaccatagagacaaccaaatctgaataggaaacaagaatcacaatattggttcggaaaaaaatttccaataacttaaacacaaaaaaaacagaggatttaacccagtatcaggtcctatttttttattccaaatattctatcaaaataatctgacgattctgctatggaggggtttgatatggtgtcttctccttctgctactttggctaattttcttgccaactttttcttgtattcaagctgcatctgtctagctatttgaatacgttgagcttgtggcgatcctgcaccatgcatggattcggtcaggtaccctacagcatttctaccaagcgtcatattctctattaaccgaagtatacgaaccctgtcttctgttgatacaccttttcgtcctttcaagtatttatcaagtaatggaccggtaacgggtcctctaaagtccttttcagagggcatagtgaccataaggcctccagcaatgtcctgagctagtcgaccaatttcgtatggaaaacgggtaacgttgtgcttgcacacattagcaagcatatcatcattaataaaattcccagacggagtcttgtatgcttgatgtgaagaagctataccggctgcaaatattgtttcattcaaatgagtcatctcaattaatttatctttaatatgggaagcgtttgaaaccccattatattcagcgattgctgcagaagcaccaatcaatacatctcctaatccggttttacaaacataacttcgcctatgataacaggtaaatctttcaaccagcattgaagcaaactccacctccccctccatgaagatcaattcattcggaataaacacgttatcaaatattattagtgcttcttgtccggaaaattgagaattgcctgaatccaagtccccctcctccatacttctggtatcgcacgattgtcttccatagatataggtaataccttttgcgtctaccggtatggcaccgacgattgcatagtctttgtcttcaggtctcattcgcatggttggcatcacgattaaccagtgtgaattaatacagcctgtctgatgagctttagctcctttgatataaacacccttttcgtcctttttgacaacatgaacaaacatatctggatcttcttgttgagatggtgacaaactcctgtcccctttagcatccgtcatagtccctccaatcacatggttttcatattgaatttttttgataaattcaattagtcttgcatgataaggtgtttgatattttttatcaatttcaaatgttgtagaatacaatgagtttagggcatccatgcctacacagcgttgaaaacaagttccagtttgttgtccgagctttctttgcatgcggttttgattcaccaagtcttgggaactttctgctatatgcaagaatctgttaacctttagtcctgtcaacgaggaagttgcagaacctatctcaggatcttctactgcgatatcatacgtagctgccaaagcattaatagaaggtctaatcataggatgatcaaccggctctttaactagttctccaaaaagataaacctgcaaatttctatttctcaaactttcaatgtactcagacccatttttaataggcatgtattaagttgaacgagatattatttgaatatttgtatatgtcctgataaacattcttagtattaatggaccaaggcattaatggcccgatcgacaaggatccatctaaggacaacttatttttaatatcgactaataatatatttatgaatcaaataagccaaatcaagactctactaaaagagcagcttcaaatgaatgagttagaaaccgacatttttttggcattgatgaaatcagaaaaaacaacttccctgggattccatgagaataccaacctaacggtggatcaaattattgaaatttctaaaagcttagaaaaaaaaggaatggttattgaagttagcaaaaatgaatttcgagctttgcatccaaggtttgcaatagtaaacagatatagaagaatttgtcaagcaaataacatacttttcaaaaagaacacattaatagataacatcggaattatgctagaaaactatcaaaatcagacataaagagagataaatattttgtaaggctgtatttgatgtaaggcctaaataagggaaaacagttaaattaataatttagaatgcaatcttcaacttcaaacaataaggacaaaattgcctattttggtgtaataaatataaatgaaaatgggagaaatataggagcggtggatatatggagaagcttaattactaagaacctattttgtgaagaaaaaagattaggaattctggatattacagataagataggtatgcccgaaattaagaatgacgaaatttgggctgtggccataaataaatttagaaaaggaaaagatcgatggaaattaataagtatttctaaagagggtaaaacagagtttttggataccgatgatgaaactaaaataattgtagatacgtcaaattttaagatcattgataaagaatggtggagttttttggtttcagaaaatgtaaacaagagcatagaaatcactaaagaattgatatagcatgataaatgaatttccagaagaatatgacaaactaaacatcgacattagtgtaaagcatgtagtagaaggggctctggctagcaaattatcgggctattttttgatttatgacaacaagttcagttttagtgcagtagcttttggtcgtataggtggacataatataaacgtcaaaatttctaaaaccactagcgacaagattagaaaattaaatttggatcctgaaatagtgatattaatagttcagaggaaaattattgagggagatattaccattcaaatgaagaaacagtaatactttcgcagggttaaaattttataagactgcatcctttaaagagtttccacaagaacaattgttttgttcttcagggatcataggtattaccttctcaaggatcctcctagtagtttcaacgttcttgtttaaggtctctataatttctcttgatgaaacaggttgatcagcccaaacatcataatcggtaatagtagaaacagaaagataacaaatctcactttctctagctaaaatgcattcaggaactagggtcatgcctatgatatcagcccgaaatatatccctatatatcttagattctgcgcgtgtagaaaatcttggaccctctatacatacgtatgttcccttattatgaacacggacacctaactcattaatacaattgacaacaatatttcgcatatcctcacagaaaggatccgctacagaaatatggcatacttttggtccatcataaaaagtataggcccgtttttttgtaaaatcaaaaaactgatcaggaagcataacatcccctggttttatttcataatccaaacttcccactgccgaaggtgcaatgattctcttaactcccaattcttttagcgcccaaatgttagcctgataatttatcatgtgagggggaattctatgaccttttccgtgtctaggaagaaatgctattctctgattcccaaattttccaataataattgcgtctgaagtaggaccgtatggagtatgaggattaattgattgttctatcttaaataaattagggtcataaattcccgtaccaccaattatggccattcctacagatttatcactaaataccatttagtaaaccaccattgaatgaacacgatatcctctttctcttaatagtttccccccatctaaggaggacaactctatgatgaatgcaaaacccgcgacgttgcctcccaggtcttcaactaggctggctgcggctagtgcagtgccaccagtagcaagtaaatcatcggcgatcaaaattctgtcaccttttcttaatgaatcagactgcaactccattacggctgtaccatattcaatcccgtaagtttgttttatcgtacttccagggagttttccagcttttcttatcatgattactcctttattaaatttcaaactcaacaatgtagataaaataaaccctcgcgcttctattcccgcgacataatcaacctcaactttttggaattggtcataaaaatgatttccaaggatgtctaaggatttaccatctctaaatacaggattgatatccttgaacaatattccttgtttaggaaaatcaggataatttcttattagattttgaatgtggctaatatccggatgcacaaaatttttttagatttatgcctataaaaaacattactagaagtattcaagaaacaaataatatgaatgcttaccaatttattaatgagaatgatataattgaaacttgccgatgcaagaagagatccctataggaagctagcaaaagaaaatagctataggagtcgtgctgtttacaagctttcacaattaaataaatcacatcaccttttgaaacaagggatgaaaatagtagacataggagcagctcccggaggttggttacaatttgcatctaaaatatcgggaagtaaaggaaaggtcattgggatcgatataaaagagatcgaaccgatctcaaacgttgttataattaagggaaatgtggaagatgaacaaacggtaacattattatcaaagtatttgataggcaaagccgatatagtcttatcagatctagcgcccaacgtatccggattgtgggaaatggatcatttaaagcaaattgacttaacaatgaaggcggtggagataactaagaaaatccttaaagtaaatgggaatgcactgtacaaagtatttcaaggagaggcaacaccggaatttatcacctatgtaaaaagcatattttctggagtccacataacaaagcccgatgcaagtaggaaacagagtagtgagatatacttattgtgtaagcaatttaacccaacaaagggttgagaaacaagataattaattcttgcggctaatatttagcattttttcagcctgttccaactttgaaacatctccactgtgctttataatagcctctaataatttttgtgggcgtccttcgtttaaagagtctctcgcaatcgatattgcatcgctaaaagattctatatctcctccaaccattaaggcagcagcactgttgagtaaaacaatgtcttcctttgatctattggattgtattccatatattatgcgtaaactttcatttattgattccatcctatcccttacagttatttgttggattgaggatctgggcaaacccaatgaaacaggatctaataattcatttttgacaatatactttccgtcctgaaaagtgatatgtattatagtgtttctgctcgtggtagacagttcatccatcccatcctgagatcgaacaatcatcgcacgctgcaaaccaagaataggtattatttctggaataatggttaacaaatacggatcggctacaccaattacttgaccatataaatttctgcatggattacataagggtccaactttgttaaatattgtatgaattcctaattccttccttaccttagaaacataccgtaatcccggatgaaatttaggagcataaaggaaaccaaggccatatttctcaatcgattttacaatagacaagatatcgtcgttatccaatcgatagcctacatattcgaacaaatctgcgctaccactcaaacttgatgacgatttgttaccatgttttgctatagctatttttttggaggagctagcaatcactgctgaagtggtgcttatattgaaggtatttaaaaaatcccccccggttccacaattatctataatagggagatcagacacaggattgatagggattgaagttcccctgataatttcaatggcagtctttaattcttcaaggtcttctccattcaatattaaagccatcaagaaagctgaaacaaaaacatcagaacaacgtccattaatgatactattcattaccgacctcatttcatcattatttaatctctgcccactggagagtttctttagatagatttggttttgtgagtttaattcatctgtattatagttattgtgatcacaattagttgtctctaaacctttatccatatttttagtatttgaactcatttctttaccattcgaataaaatttgagagaattttcttaccttcaatagttaatatcgattcaggatgaaattgtatcccctctatcagatatttttcgtgacatgcgcccattatttcttggtcatctagtgaaatagaagtaattttcaaacatttagggaaattatctttatcagcaattaatgaatgataacgtgttgctacaaatgggtttttaacaccttcaaataactcagtattgccgttgaattggatattactggttttaccgtgctttatttctcttgccctttttatcgttcctccaaaggcgttcacaatgccttgatgtcccaagcaaatacccaaaattggaacagatggtccaagtttggttatcacatctgtacaaattccaaaatcctttttgtatttgggatgtcctggaccaggtgatataataattgcatcaggattcattttagatatacctttaatggtaatctgattattccgtttcactacaggatcaatgttcaataaacccatgatctgggcaatattataaacaaaagaatcgtaattatcgatgataaggactttcatttaactagtggtcacaatttattatccaaaagttgataataatactttctaaaaaggctaaatatgtaacatctttttgtatttgtcaaatctatccaatatattttcaatagttatccgcattaatccatcagttccaaactcttctatagcaaaagtccccataatacttcccataagaattgattccttaattagagtcaaatcaaaacccaaatgatttttagattttgagattaaatatcccatgaatccgccagcaaatgaatctccagctcctgtaggatcagtaacgctttctaatgggtatccgggtattggtacaacctcgtcaccaataaagagtaatacaccatgctctccctttttaataattgcaaaatttggaccataggataaaagttgttttccacatttaacgaggttaggattattgcaaagcaatcttgcctcttggtcatttattactaccccgttagttttctcaatcatagatataacagagttctttttattatgaatccaatattctatggtatcgcaaataattaattcaggagtgttaaaactattaattatttttatgttttgttcaggatcattatttgcgagataaataaatttcgagtttttatattctattggaacagtcggttcaaaattttcaatgacattaagttcagttatgtttgtcgtcctatgagacaggtcaaaatcaaatgtagaatcataaaagaatgattttttgtcatcgaatcgctttaagcccttaatatccattctcttgcccaactgaatgtaataattatctggaaaatcattcccaatcgcacctattaatgagacaggtacaaaaaaggatgcagccatggatgcataagtagcagcccctcccaagatacgctctttggtctcaaaaggagttcttgtagtgtctaaagcaatcgaaccaaaaactgtaagcattagaaagagtattagggtattaaatataaaacattggaaacacaataaataaagaatatgggagaaaatccaagaatagttgtagggattacaggaagttccggtgtaatttatggcataatgcttttgaaggcactagagaagtttgagattgagacccatctagtacttagcaagtggggagagaaaaatatcgagattgagacagaggaaaatgtcaacgagattaaaaagattgcgaattttgtctatgacgaaaataatatggcggcttccatatcaagtgggtcgtttagaaccgacgggatggcaattattccctgtagtatgaaaaccctttctagcattgccaatggttacgacgataacctcatttctcgagcagcgtcggttaccattaaggaaaatcgtagactggtcctggtccccagagagactccactttcaaaaattcatatatcaaatatgttaaagttagcagaaattggggtggtgatattaccagcgatgccaggattttaccataaaccaaaatcaattgacgatttgatttcacacataattggaaaaacacttgatcaatttggaataaccaatgatatgttcactagatgggataaaaaatagaactgagcagtatcaacatttgttacaagagatgtattatcatgagatagatccattagaatagaaatcattaacctgagattcatggacctagtaaaattccattgtctaacctgctactctgcagccagatagtgtaatcactttactttttcccatagatccatttttgctaattttttcttcctattatgttcttcaagcatatggtacactgatttgtgggagctccctttacaaatcattaaaatcgcatttaaagctagagacgtttcgtcataggtaccaatgaaacctacaaaatgtccgtagattgatatatcagcaccagagaaatcctccaaattctttctaaatttaccgctttgtccaataagtctagatttgatcctgtctaaagaattcattgattttcccgaatattcacgtagatctacaagctgtagtagagaatcatcagatagcaacctgtaggccctttcaggagaaaagccttttgaaatggccattattatttcggaagctttgaatattccactattcattaatgatgcttcgtttcttagtcggatcgttacatctccattatctccgtctacttctaggataatattacattttgattctatttcagatttgacagaacctttcttcccaactattactcctatacgatctttggatactttgattactttaaagacattgtcaaaagtcactatatgatagtgaaccccaaactataatatattttaaaaaaagcgaccttcatccaccatgtacaactgacaaaatagtaacggtatctccggatgaaattttagcttctcttccacccaatacagaggactcgacgccatttatggcgatcattatttcatccttctttatcttattttccaaatcatactccttctccaataatgtcagtacctcattgatgttcgaattagttacattgacatttaccgttgaaaatccagctgtctttcttataccaccaactaaatcaacagttatcaatcttattctgcaatttcttctcgagattcagtattttcctcagaatatgagagtgaagcattctgttgagcaagatttctatttacattcttggtaatgtagcctgcaattttgtttcgtaattcctttgagcgaacaatagcaaaattctttatagtttctttattttcattaaaatcactagtaaatttatcaggataacgttccaacaattcgttggccatttttttgactctatccacatgataagaaaaaaaacaagggtattttatcttttatcttaatttgatctcaccaaaggacgaaccgagtatagatggaaggctaattaacaaatcgtgtagaattctcatagagaatttcagataattcatcaaaggatttttttaacaaaatggaagcaaaataaactattgtcactaccaaagaaggagaagtaagtgtaccgtcaaaacaattcttgtatttgactggcccatcagtttctatcaatatcaggttaacatcagattcttttaacagtgtatgtttgtcatttgagtacagaagataaggaccaaaagaaacgaaataccccttatcgtttattcttttaagattacttttattgccatcataccaatggaatactgcattcctaattttatatgatggcaatatctctagaatttcattgacagatcttctagaatgaagagacactggcatgtcatttgtttctgctaaatctagcattttttcaaaaacaattttttgtcttttttgtgtattgtctggatccaaattggcatatgttggatcgagtccaatttcacctattccatcaatataatcatgtttggattggacaagactttcaaacaattgcaggtcagaagaaacggctgcaaactgtggatgtataccaacaaaaatcctcaggaggtcagagtccttaaaaaatttttcttttaatgataatgcctctacagaggaattgaaatcttcggacacacaaattgattgaacattagcttggcgcatgtaatcgaatattatcctatgatatttctgataatatttatctgacaaatgaatatgcgaatcaacgtagtacaaattacttgatcatattggattcacctaattaattattagtttctctttatgattttgttaacaagcgattaatctatccactagttattgaaccccaatgttgtcttcaatctgagctaatgtaaattgcattacgagcctattcatccgaccgactgataaagaatgtgtatgtagtaataagaatgaactctttaattgaatcaattttacataggagtttaataaacgaagtaacaagtcaaatggaataaatggcaataaactcagaatcggaaatagctttggcttccattcacaggatcataaaaaaatacggtgccgagagggtgagtgacagtgcagcagatgaattgagaagcattttagaagccttaggcgaaaatattgctaaacaggccgtacagttggccaatcatgctcaccggaaaaccataaaatctgaagatataatactcgcatcaaaaaattttatcaagtaacaatataatgtcaagaacgtaatcatttttgatgttgttgaaatgtttgagccataatctaaaaaagatagaaaatcattaccaaagaaatataagttttcaatcaatgtaaaataaacagctggtggggtggcagagcggccatgcgttcgcctgcagattcaaagatacagatagcgaatatataagggttcgaatcccttccccacctcatgtaaatattatttcagatgtattttgatagtagataggcttttggcaagtattatattgttgatatcctttaacaataattccatatttatatcgtaaaaatattctgaataatctctgaacttttccaaagagcgatttaggatggagaaaaaaattgtattttctcctttttggaggtgtacatatgccgcatctactagaatcaaaccgtttaaaagattttttgcttgtccctttgaatctttccaaacactctcgagaacttcatgagacttccagtacctttccatgttgaataggaatactgatagtatcacagcatcttctctggatatataatcggttacttcattcaattcttctaagcggatcaaggatcctaaaatgttaattggtccaaaaaaattttgatcttccgggctcaggggtgtattgtcgtgcgtactaacgtctatttcgataaaataactcgaaatcctgatatctctgattactgcatggttgtagttttttagcagcgtacgcagtgaatgtaaaacgctcctagagtttgtgggcaaataattatttttgttgtctagataaataagatatctttttttcatgtaaatagtttgatattaaccaattatggtaaatgagccttctgattttggtagctgaggttgttaaaatagatatcctgccattaatatcaataaaccgattcagacgagggtcttaggcccctttttcttgatatgaaaccacaattaccacatttatacaccctttttcttttataagtgtaaataacatctatttcctctatccaatcatgggtggtttttaacatacagtttgtgcaaaatcttttttccaaatggatttcccagtacatatgttgttggacaaataaaaatatagattttctctatttggttattttcttagttttgtccttaacaacagcggaacttctcttgggctttttgcaactggaacattcgccttagcatagttatttatttttgaatcagcagacccgtagtttccgtaaacaattgctccagcatgacccattcgtttttctttgggcgcagaccttcctgctatgtaggcaactacaggttttgagaaattactccttataatatagtcagcgagttgttcttctgaatcaccacctatttcaccaaccacaacaacagaatcaacatcttctctgttcctaattaactcaaaagaatcaattagattagttccattaatcggatcgcctcctattcccagtcctaaacgttgtccaaaaccagagttggaaagatgaaatgaaacttcatacatcaaggtcccgcttcttgaaaatataaccgtcttccctttagtaaaaggttgagcaggcatgattccaactttcattatctctggaataatcacccctggagtgtttggtccaatcattcttgctccttttttctgagcatactcgtagacttttattgaatcaataattggtacgtgttctggtatcgctactactagtttaatcccattatctagagcctctttagctgctttataaaagaaaggagcaggtacaaatattccagatataactgatcccgatgcttttactgcctcctccacagtgttgaaaacaggaacatcctcgaatttagatcctcctttgcctggtgtgacacctgcggcaatattcgttccataagatctcattagtctggtgtgtgttgacccaaagctgcctgtaattccttggataattacaggtttcttttcataatctgcgtcagactcattccctgataaaattctaaaaatatcaaattgtgtgctcaaattgttccactttgtttagttgttatttacctttaagactatagcatttattgcttcctctactgtatcaaataagcgtgctttgcttccattgagcaattcctttgccttttcggattgcgctccagtaattctagcgtatacaggcactgtcaatatattattcttataagcctccagaatacctaatgctacaagatctgttcgcacaattcccccatatagattcacaaggattgcttttattttcggaagtttacttatgactttaagagcttcgtaaatagtttcacttgtggctcttcctccaaaatcaaggaaagctccggcttttccatttgcatctgtaaccatatctaaagtggacattactaatccagcaccattacctataatagcaatgtctccttccaattcaacaaaagaaaatccatttttagcggcttgtttttccaaatcgcttagataaagatacttttgcaaatcctcgtgcctaaagagagcgttatcatctatgatcaccttagcgtccaaggcaagtaaagagtcatcagagatgatagcaagaggattaatttcggcaagttcagcctctttctctacaactacgttgaagagattcaacagcatattgacaaaactttctttggatttactagggatattcaaatttgatgcgatagtgtttgctaactcaaccgatatgtcgtcaatagagatatcttggattattttattatcagtttgttcaatatcaatccccccttctgatgaagctattatcgagaaacagcgcttgctccgatttaagaagatagacaaatagatttcttttacaatatccaccattttctctaagaggatacctcttggcaattcgccctttacttctttcttcaataattcattaaactttgtttctaattcggaggaatctttgcatttttgaattgctccggctttgcctcgcccaccaactgttaattgagatttcaggacaaacggaaaacctagtttctgagctccaattcgagcatcttccacactttcagctagaatagactctggtgtttttatgccaaattgattaaattgctcttttccttgatattcgagaagtcgcatctttgtaaaggtttgaaaatactctttataaacaatccttttttatttttatttaaggattactgaactattccctaaatttttcaagtcctggctcatattgtgtgaatttgatgtaatattctttacgtttagcaaatacaaagagtagtcttttagattattcattaattcaacgtagtttggcattaacgtttgattcggttgtccatttagcagagtctgcattaattcattgttttgaattatcgagacactaatgacatcgtttatgtatgtcttattgacagtatttgttttagcatcattaatttgatcttgaacttcgttttgtaataacaaaaattgactattgaccgaggttaaagtatcattcggatccaaatatgtgagggtcatgttactcattccactattttgtacattttcggaaggtagaagccaaacagcaaagctagcgcctataatgcttattactagaataccggttaaaatgattccttttttattaattttcttaatattattactattatcattttccttcttgtcagtagtcattaattttttttgattaaactataattattactttatgtttagataaatttttgggtagaaatataatcaatgacatattatttcaatatgagacagatttttcgtgaatcaggacaacaaatatgcgctaagaaggataaagtatcaaggaacgtatatgatcaatatttgtgatcttgatttggtgggtaaagtgatcaacaaggacgattttactataaacatatcaaaagaatattttcatgaggaagagattaatgaggaagaagctgcaagtttattaagatcgtcgtcaatgttgaatttagctgggaagaatgttgttgccctggccctgagactaaagctcgcaaaggagaatagtgtaaaggtcatagaagatgttcccttcttgatggtgtttagtttcttaggaagttactaaattacaaagcaattgtatatcagtgatactaatactcaagatcttttatcaaatcatgaatgtcctttatcttattcaatggtgaatcagaattgactatcgctctacctataattagataggtagaaccggcttcaagtgcgcttttgatgtctcctccctgtgtaataatacccggggagtagatcgggaggcctttattatctttagatcgcaattcttttaatatatccaatctatttcctccaactactataccatctacacccacagacttggagttatcgtagaatatgcgataaacaggttttgaattctcccttttgtcaaaactgtttggaatcgttaaagaagctccatacccttctactgcatcagaatgactcatgtataccaaagatattaccccaaaattcaatgaatgagcatattcaacagtagatttaagacttattttacctataaaaggatttacaataacagaatcgaatcccaaggacgcaagatatcttattgtaacttgattggtatcaaaaatatcatttagttttagatctgctataatctgcaggttgaagtcatgagcaatttgtgtgattttctttagctcaattttagagaatggcaatattacatggaaatttagcttgatagcgcaaacataatcatgtagttgactaataatatgacttacatagtcgaataggttttctacctcgcatgttggatctaccgccaaaacaatactgctgcttttctctcttttggttgcatcaattctatcagcgaaagaatcataattttgcattttcataatttgactaacgggtgtatatcatgtaattttatgatctttagataaatgaaaccgtgttcgtcgatatgatttgaaaaagaagggggagttgatttttgcatgttaaatttcatgaaatacttttcaatttcttgctctaatatgacataataaaagaaattcgtatctgaagagtctgtgaggtttaaatgagatcccaaaatgtatttcatattgaattttttgtctgaaagatccagatcacttgactctgtttttgggaaaagaaacaacggcaatgtggattcctcatatatggtatgaaatgcaactaatttcgacaaactaaatagatcccttaaaccaatcccagtgtatttggttgttgtgcctatcttcgcgggtttgagaaactgttgcggtggtacagataactttatgataggagagtatagtgctgatgtatcctttatagaatcaaccatcacagcttcctcattattattgttgatcttatatgaaaggtattgattttcccctgactttatgttatcgacatagtaagtaattgagtgtccatttagagtatctaattgggcagcgaagatatctgaattttgataattgtattcataaataggaattggaattctctccaacgagcaaactaatctagcaaaatcatttagggattttaattttatataaattggggattttagcaatttgaaacgaacttaacaaaaggtaaaaattatccatatataattttaatacaataaagtatattaaacagaaaaacaagggaaagaatttaagggtagtataatgatcaatcttttagtatttgtttagaataacctgggataaatttccaaatatctttagcaaatgtttgttacgatgaatagcgatattaataaagataatttatttgctacaatttgtatttgtataactctaaaaaaatagataaggtagatagtaggcgaatatttcagacagaaatgacaataaataacatttaatatcgaaaaaaatcaaatcaaattatgctaggttactctgatgacgatatcaaaaatgcagcagagataagagaatggttaactaaacaaattttagaaaaacaggatgaaatagagaaaataaagataaccctctccttaattgattcggtattaaaacaaggaagtttcaaaactgcagccaatcttaatttctcaaaaaaattctcacccaatgaacaaaaaagtgagatgaattcgctaaagaaaattcctaatcaatattatgaaaaacgcagagatgacgaagagcaaactgagccaagaaaacaagccttcgatgaaacaagactaataaaaagattaaaagataatacccccattgctcgatttcatgtgacttcacaggaagtacgaattattcccgaagatcaaattagaattagcatagaaactccaccctttaggtcattttttttaaacagaatattacaaggtatgataaacaaggacgttgataaaatcaatcaaggacaattgtcggaatcggaattaatcagttatgatatcattaccgagaatgaaaacaaggatctccttaagaaaatacagatcaagaattatagagataaggaaaggatcaatgaaattttcaataccgccgcatgggtattgacaagaatgctagacaaagtggataaataatggacaaaatagttgtactggattttgggtctcagtatagccacctaatatgtaggagaatacgggaattaaatgtctactgtgaattagttccttacaatattccagtcgagaaaattaaagatctagaaccaaagggaataattttttcaggtggtcctgctagtgtttatagtaagaattctcctaaacctgacgatgaaatatttgaattaggtgttcctattttgggtatttgttatggacatcagatcattgttgaccacttcaacggcaagataaagagagtcacgaatagagaatacggcaatgcattgttaacaataacggacaagactaatttattcaaaaacatagattcagaaagtctgaaatgttggatgagccacagtgatgccgcagagataattcctaaaggatttgaagttataggaaaaactagtagttctttttcagcagcaataggtaacaatgacaaaaagatttttggattacagtttcatccagaagtagctcatactgagaagggagataaagtattattcaatttcgctaaggtgattagcaaagcaaaccctgaatggagtatgtcgaactttattgaaacaagcattaatgatgtacaaatgaaggttaaaaatgaaaaggtcctgtgcgcagttagcggaggtattgattctactacttgtgcaattttgatacatagggctatcaaagataatctgacttgcgtttttgtagataatggattattgagagagaatgaaagagaaattgttgcagatattttccaagaaaaattaagaatacctcttagaatcatagacgcaaaggagagattcttgaaaagtcttgtaggattgacagatccggaagaaaaaagaaaaaaggtaggcgaggaatttgcaagagtatttacagaatttgcagaaaatgaaggacccttccagtggttagctcaaggaacgttatacccggatgtcattgagagcggagtatcaggcggtcccgctacggtaataaaaacgcatcacaacgtgggcggactccccgagtggctccatttaagaattttagaacctttgagatatttgtataaggacgaagtgcgaaatgtagcaaaaataatgagcgtacctcaggacttgcttacaaggcacccatttcctggaccagggctagcagtaagaattgtcggtgaaactactcgagagaagatagacgtggttagaaaggccagccagatagtagaaaaaagtactcgttgaagataatttatataataaagtatggcaagcattcgctatagtgggagatgataaggcagtcggaattttgggggatgaaaggatttttggtcatattgtttccataagagttgttgaatcggttgatgcgatgacagctgattggtcaaggttaccacacagcactttagaaaaaattagttccaagataaccaatgaaattgaaaatgtaacttgggtaacatatgttatatcaagcaagccaccttccactattgaacctcaataactagaatggttgcgagaaatttgacaaatcgattatttgtataagaaaatactatggataaaatatacctacagaaataaagaaatagatattttagattagttagtaataagggagtggcccattctcaacgagatattatcagacatcatcatctttaggattaatctgtttatgtttgttattaaatttgttcttgttttttaatctatttttgtttatacgattaattcgaaatatgatcaaaaaagtcaaaccccaaaggattatggcaatagaaatctgacctatcatccacaagtaacctccaagcaatgcgagtccaaaacctgcaaaaacaagaatattcttagttttcatattactttatatttattcaccccataaaaagatgaatcgtgatttgaagtcgtaatttgggttaccaaagcactagatttttccaataacaccccagtcagatattttccaatttgcaatttttttttctttaaatcaagatttgaaatctttctttttgaaaaaaaccctattttggagtcaaaatccatgcctacaagcacgatttctcttgctaaaaactcaacagcaagagatatacttctatcaccatctgtaaatcctccaaaattgtagacattcttcaatggtaaattttgagttgttccgataacattactaaaatatggaacctgtgaagagatcttatcaaagttgtcaccatgagcatgtactaccataattgatccgccagaatcagccctatttagggattcacgatctccatcaagatccgttacaacaaaatccggaattattcctaaatctagacacatttcagtagcaccgtcggcggcaatcaccaccatattccctgacatggcagtattaaatttacctctgccgcagttgcagatttcaagtaagtaattttgtaccgtgctttcttcaatgcttggtcctgctcctatgactattgcgttgttgttttgtatttttctgaaacatttcggatccaagagttcatttggtttcagagtcgataagttcaaggaatttagaaaatccttttgaatatgaatgttcaataatctagcaattattagataataaggataccagtcattgaaatacaatcaattaatcaataaccaatcagtagtatatcttgatttcattaaacttgataattatttggaaaatcgtgtccagtttattccatcctccaaatgtaaattcacatttaactgttaaataataagatatgtcaaaacatggtatggatatgaacgatatagataaaaattcagatgatatgttaaaaaggatatatggttttaagaatattgcagtggttggaatgtctccaactgaaggaaaaccatctaactatgttcctaaatacctaattgaaaaggggtacaacgtcattcctgtaaatcctatttatcaggagatcctagggaataaatcatatccaaaagtgtcggacatcccacatcaagtagatatagtagatatttttaggaaatccgacgatgtattaccagtagttcgagatgcaacactcaagaatgggatcaaagtaatatggatgcaattgggtatatacaatagagaagcaagagaaattgcggaaaataaagacattagtgttgtttataacaggtgtatcctaaaagaacatcaacgattgttttaggcatataggtctaatatgaatattaactcttaatttgaaaagatcgagtaacttaattaaatagtaaatcattttatctattgtatcattaatgccgaaatggggccaacttgacaataaaatagatctaaaaaaaaatgagaattatgacaaaagggggtccctgcaagattttacaaaggtcattgtattttgtatcgacagagatgatgatattggtattaagggaggactggaaactccaattatcggaaaggaattatgcattaatgcaggaacaagattagcgattgaagatccagaagattcagattgtaatgcgatttttggagccataaaatcgtatgaagaattcaaaatgaagggctatgatgtagaaatagccttggttgcaggcaagtataatagaggcattgagggagatttaaaaattactcaagagatcgacagagttttaagtgtattcggagcagatggggctgtagtaatatcagatggagaagacgatgaaacggcaataccattgattcagggtcggatcccaatcatatctatccaaagaatcattgtaagacaaagtagaagtgttgaatattcctatgctattttagctcgttatataaaaatcctattttacgatcctagatattcaaaattttttctgggccttccaggtgcacttttagttatcagtggcttgtcaataatttttggattctctcgcgaggcatttgcactaggagtaagtatattgggtgcggcttttattctcagggcatttgatatagataaatcaatagcgagtttttcaaagcctactccttctggatttatcaggttattttcttattttgctggcacaatgataattttagcatcaattttaagcggaatttctcacattcctcaggaattattggattcaagtcaaggaataacgtcaattttgactgacaaagttgtgctaagtacttttgcaactggaactataaccctactgtggataggaattgcaacgatatttgcaggcatattgttgagtaattggttcaaaggtagtatcaatataatatatgatattctgcgattagttgttttgggtttattatacatacccatgttgcaattaacttctttaattactgagcgtggaaatcctttcaatttaatttcttcattgttaatcggtttggcagtaactttgatagtggcaacttttctattccaatactttagaaaccgaaagggtggtgaagctctaaaacatgatgaccaataagatatattagagcatagatgagggtataaaatatctctccaaatgtctataatagacaagattttaaaactactgtatttaacatctagacataatcttatttacaaaatatatgaaaaacacttgacaagtcaaataaatcaattcccttttcctcagcacattggaattattctagatggtaacaggcgatggtcaaaaataatggatatcgataaagcgaaaggccatcaaatgggtgcagacattgccgaagatttattgaattggatttacgaccttgggataaaaataactacagtgtatgtattatcaaatgaaaatcttaatagggaaacagatgagctcgaaaatatttactccttactcgaggataaattgattggtttgtataatgataagaggatacacgataagcagatccgagtaaaatcgatcggagaattcaatatacttccacagagattgcaagatattttgagaaagttggaaacgagaacagaaaactatgaaaatatgtatttaaatatcgccattgcatacggtggacagaaggaactaatagacgcgattagaaaaatagcgacgctggtaaaagaaaataaatttgaaatagatgatattgatgaaaaggttattgaagcaaatttatatactgcccatctcccccaagctgaaccggatttgattttgagaacatcaggggaaaaacgattgagtggctttttgttgtggcagagtgcatatagtgaacttatttttgtcgatattttttggcccgaatttagaaaaattgatttgatgcgagcaattcgaactttccaaaagagagctcgaagatatggcaaatgatttcaggatttaaattagactagcaccctttatatatgatcaatgcctaagcacggagaaatcgataatgaaaaaaaattaatctattgtggatattggatgacatttgatgattgggaagatattcacaaatatagccccattgtagatggttcagacgacgatgcaaaagaggcgattaaagacttcgtataaagggcctcttttttaaagtgcgagaagcgattctaggctgtaaaggtaagtcgtgagtttgctattatgcttgtttgcaaataagtcgagttattgtatacaattcttttttctgttgggaaaatacatatcaaatccaaattctgtccttgatatattgcatcgttctctcgctcatacttctttccaaagagtaatggatgtggtgatcaagatttaagaacctgcattcttgatggtatcaggtaactccgtctgtagaaaccaaatgttttccatgtatcttgaccatgcatgaaatgaatttctctactgcaagcatggtactttcaatcgatagagttagtgcgagaatttgcttgtttttaggctccaatgcaaatcagaaccaaaagtaatcggaccaaacttgatcaatgtctcatcagtaatatactctgatatcattctattcgaggatatcttttgagattagatacttttgtatccagttcctgattgtagtatggcttctcttgacaattctggataatgttttagaaagttttctcaaagaaaaaccgttaaaatacagagagatgtatcgcaaagatcatatctccggtctcatttcattttctatttgacgaatcacgtttcatggaagcaatggattactaaagctttttcgttaactttacaaagcctcatttaagtatgaacacgcttttataattgttaaattcattcaaggcaatgtatgatgaaatttcggccggggctgtattatatttggttgacgaaaattctgaaataatgtatttgatcctcaattataattatggacattgggattttcccaaaggtaatatggaaataggggagacagaaatagataccgtttttagagaagtgtcagaagaaactggaattaaagatcttcaaataatcaacgggttcagacaacaaatttcttataaatataggaaaaaatctaaattagtaaataaagcagtaatttactatttggcagaaactaaatcaaagaaagttgtcctatcatttgagcacattaattttgaatggcaaactttcgatcaggcaatgctaaaactatcatttgaaaacagtaaaagagtattaagaatggcaaatgaatttcttttaactacagaaaacgtgaaaagaagttctattaaatcctaaaaaagttttgcttatagctatcaaagtcaattaggaatgagttaaaagaacttattgggactataggtacttgatttacgtaccgaaattcattagggtaaaaagtaataattataggataagaatattcaattgcaaatgatttattctttttcataaagagagtacctcgctctttctgtttctctgctgcacccaccatttcggaataagaatttcttttccagtgcttacagtctacaactaaagcattttgtaatcttatgcctactacatcaatttgtcgggtgggattcttgagacgatagttcttgtatacagcatagttgtgaaatttcattgcttcggaagcaaataattcaaaatccctccagtcaattaacttacagacagtcaaaatatctgccccacattcaactgcggctaacgcaattatgaccttattataggaagaggggtttatctgccggtcttttattgctacccctctagtggatagaaaatctaaaaaatttagagtcgaaaaactatttttgattttaattttttctacgtttgagttaaattcatttagaagactaagaagcgtattaggattgattttcaaatataagagtaaaaaaaagagttgtgattgtacgtgattacgttacaattactttacctgtcattgcaggatgcaatgtgcagtggtaatcaaattcgcctgcagtgtcgaatgtatgctcaaaggtttttcccttagcggtgagtgctgttggaccttgtaaacctgaatcaaacatttttccagcatcggcggcgccaatttttccagaagttacagtatgaaatgcagaatcattatttgtccattttacttcctgaccaactttggcttgaataggatttggactcacagctgtatcggtcaaagtagatgctcctggaactatggatgcctgtacttcatctgattgagcaaaaacattattgtttgcgcttgctccaatagcgattacgctaaggattgcaagtaaacttgctgcaagataaattggtttatttaccatttttatcaatcttaaagtaaaatttaccgtaataaatattataaggtaaagattatcaaaattttagcatagaaaggttgataaatattttatacaaactggacatagtaaattataagatgcaaagtgaatgaattcatcactctattgcagagtgttagacattttccaatttcagaggccgaaaaaagagtcctgtataatataattaataatacacaaagagattcgagcaataaaatagagactaaaaaaattccttggttttactagtaataagatggatgaaaaattttcaactgcatcggttgaaacaaacagtttgattgaaaaaggcttgatccattcaattaatgctactaaagacccaaatcccatggttgtcatggaccagaggccaaataatgaaaaattcagcttaactagtattggtctaattcacatcttcaacaataaatacatttattcgcctgaatttctgcttaaatatcacaaagatatttttttgcaaaaagtattatttagccacattcaaaccgatacaataaaggttgctacagccaagttttttaacataatcacagagcatttgacaacagcatctaactatgtcataaatttatcacttgagatggacaatcccccgaatgaaaatacaaaaaacgaaattgagcataaaataaagattttttctttaattttaggtttaagatagctattctatttaatgaacataatatcatatcatcaaatcttgacacaaataatgataaagtaatttttgctatccaccaggtagaaaccctcatgaaaaagaatttatctaaggattcaaaatttctaaatttattatccgctgtattcaacgaattcagttcgggctatgatgatttcaccagcttcctaggtcaaaataataaacaagagtactaataatatttttcattcattctatgtatttacatctatgagacgatttgaaaatcatataatgagcactttataacaaaaaacaaaatataataagcatcttatgcgtcaaattactatcgtaatgtcaaaaacatgtctaagatgcaataaatcatttaatgaaagtgatgttgaagatgaaatatcacaaaaatacccatcttgtcctgaatgttggaaagaatggacaacctatgcagtcatggtcatgaatgagatgagactagatatgtccctgcccgaacatagaaaagctttaagaaaatacgagaaaggattttttgataaaacaataggggaaatagaaaaaaagccggagactaaataattaaaccaacttcgtatttatttatacatcatctctagtaatgtagtagggactactctcaggatcaattttggattgggagtattaaggattgattcaaaaaaacagtcaagtatttttattcttttgtaggctggaaactgggtcagtacatttgtcatagatatcacaagatcctgattaaagatattgattagggatggttttaaagtaatttcaatcatgtaagaatagaatatagtaataatttcatcacttttcatttccgtcaatgaattcaaccaagaatcgaatatattcaataaagcctgattttcaattttcccataattagcaaaaacattttgaataatttcctttttttctgctgtatcgaaagataagaactcgttcagccgacttctaatgataggagatcggagaccaggtggtaaatttgataaaattatcaaaatgttttctacaaatgatgatgcaggattgtcattgtccacatgagtatgaaaaaatcaacaatatttttttctttccaattcccattacttcaaatcaacaagacaaacaaaatcacattaacaagcattattaatcagaaaaatttgctcccgtttagatagatctttgttatccatctcacacatagcgaatactaaaactactaggattaaatattctatgttttttaataatatatcgtatgccttgtattgtcactgtaggtggattttatggagatgaagggaagggaaagatagttgcctatctttctatcaaagataattatgacattgccgctagaggaggtgcgggccctaatgcaggtcatacttttgttcaaaacaacaaagagtttaaagttagaatgttacctagtgcagtattaaacaaaggtaccaggctattaattggtgcaggggtcctcatagaaccaaatatattattgaaagaaatagagacattcagtactaccgataggacttttgtagattttcaatgtggtgttatagaaaagattcatcaggataaggataagaatagtgatcatctcaagaaactgatcggtactacggggacaggcactggtcccgcaaatgcagaccgagcattgagaagtctaaaacttgcaaaggattttccagaaattgctttatttttggaagacgttagtaactccattaaccattcaatagataataaggaaaaggtactaattgaagggactcaaggcacctttttgtcactctttcatgggacgtacccttttgtaacatcaaaggatgtttcagcttcagccatttgttctgatgtcggtgtaggaccaaaaaaaatagatgaagttttgattgtttttaaatcatatgttaccagggttggagaaggaccattaaattctgaaataagtaccgagcaagcaaaggagagaaattggttagaatacggaagcgtaacgggcagacaaagaaggtccgctccatttgattacgacttggcaaaaaaggctattcgaataaatagcgcaacacaggtggctttgacaaaattagatatcgttttcccagaatccaaaggtattacagatttttcaaaattacctacaaaagctaaagaatttgttagtaatattgaatcagagactggattaccggtgaccattattgggactggagcagaaataatggatacaatagatagaagaaataacaaataatcctcatggaccaaaggcatcagttttcttgttataaactttacaagccaagaaaaataaagtgttctcggtttcagcccatgtataatcgtacggagtttggtccttggcagaaatggaaagtaccatgttatatcaccttaattgaaatgactccctatgaagaacattcctttccatagagagtcgtccttgagcagacaaatacgatttgaataatgtaaccaaaattaaaagttcgagttcattactaatacgccaataaaaccatcctagatcttgacccaccattttgataataaactaatatcgaagtaatgagtatggttatgaccacgatcctagcatatcccaaaattagttctatgaggccatcagtaatgctacgccatgggaagtcccatggtaataggaaaattcccgaattggtagtccttgaaatactgcaaatccttgaaagattagccctagagctaccgccctagagctaccaagattctacgtgacaaaagagcaaataagaaagatacctttcttctagttagattagttagtctataatctatacaaaatatgctagttagaataattacgaataaaaaagaggttgaaaattttaaattacgtctacatcgtgtggatggctctccttataacctgcgagagtaatttttatgaattctgcattttcctgcatttcgccgattgtattggcaccacaataacttagccccgatctaactccgccgacaagttgtcttataatttcaattacgctgcctttataaggcaccatagcttccactccttctggaacatagtcatttaaatcctcattatcggaacttgattctggattttctctataccttcgacccaaagcagcataaaatgatgccatgcctcgatacattttatactttttaccatttttcaccagggtcttgccagggctttcatcagttcctccaaacatacttcctatcatgacggatgacgaaccagcagccaaggccttggtcatatcacccgaagttctagttccaccatcagaaataatcgggatatcatatttcttccccatcttaacactatcaataatggctgttaattgaggaaccccagaaccagtaacaatcctggtgatacagattgaacctgacccaacgcctacttttactgcatcaactcctgcttttatcaaatcttcagttccctttccagttgcaatatttccagctataagctcgcaagtcggaaatgctttcttaatcatttttacagtatttatcgcgttgtcactatgcccatgtgctatatccacaacaattacgtctgctccattgtttaataatgactcagttctttcaaggtaatcgccctttactcctacggcggccccaaccagcagtcgtcctttcttgtcttttgaagcacttggatattcctccattttcaatatatctttaccagtaataagtccgctaatctcacctttttcgtttataacgggcaatttctcaatcttattcctatgaaggatttctttggcttgttctatagtagtcccaactttagcagaaacaacatctttagtcatcagatcggataccagtacacttaggtttctttcaaaaacagtatctctgcgtgtcagtattccgcatagcttattactggaatcttttactaacaatcccgatatcccattttctgacattaaagagtttgcttctttaatagtactattaggatcaatggtatagggttgttcaataactacagattcgctccgttttacctttaaaacttgttctacttgatcttgaattgtcatgaatctatgtattattccaattcccccctctctggctagtgcgattgccattcttgattcggtgaccgaatccatgttggcacttatgatcgggacattaagactaacatttgaagaaagtcttgtttttagactagtttgtgatcgagacacgataggtgatttcttaggcaccaagagaacgtcatcaaaggtgaggccttctttgaagtacaatattaccttaatccatatcatgtcctaggattataagcgttttcttttttggttgaaagggtaaaatcatagattattagaaaaaatcatgactcatgaataatgtactttatgtagagcataaaattgtaaataggtagaatggtacctatttgggaaaaattatcgggtcgaattcaatgtagagttatgtgctgtttcagctgttgattcagctgtagaacccaatgggatttctataaatggaatagcaccaacgtcactaccgccacctgcaccaccgctgcttcccgttactaatggaagttttccatcccatctttgagtcttcaaccaatctaagtatgtactgctattttgaagctgaacgtctataatctttatggcttcagattcaccttgtgcttttaatatatttgcttgtcggagaccttctgcattcgctatatttgctttctgttcacctaatgccctagcttcagtttgttgggcttcgatttgtattcttcgtagttcattttgagcctggagagcacgttgttcggcctggaccttagcttccactgcttgaacgaattgatctgaaaattggaagtcagtgatagatattgtatccataattatattgtaaggagtcaatctagcctcaatttgttcctctatttcagatttcacctgatctcgtttagtaatcaattcttctgcgttatatctagcagttacttgtttaacagactcctgaatagttggcactataaccctattagaataatcaagacctatctccttatacaaaattggaacagtgtcgggattgattcgataattcaacgcgacttcagtcgccacattttgaagatcttttgaagctgaagtggtgctttcaacaatcttttgggttcggacttccattggcactatggaatccctgaacggtaatacgaaatgtaatccttcgcttaaagataccgaggtatcaactgcaccgaattttagtaatacaccacggttaccagcctcaacaatcttcaaactagaggtcaagacaacaaaaataataataatagcaattattgcaggtatagctatttttaatggactagagaaaccaaatcctcctccaccgcctacatcttccagtggttccccatctggtgtaattcgcctatttcgtttagatttaaaaaaatctaccatgtttgtattaatttacgaatatacgtgatttaaatatttataaatattaattctatgatctataatttgccaaattgttctaggaattctttggaaaaatttgcagtttccgacagatttgaagcctctttcacattactattttttatccaaacaatatttccatccaaatctactaatatctgcttagatcgttcaagatattttagaattgcgttaattttgtccaatgatagcgtaggagacagtagcttcctcaaatttcttaacttgggaaatggctttacatcctttatcgtgtcaataaaataatcaacttctgcatctgtatacacatttagggcatccaatctttttttcttgttgacttttttcttattaatatttgaattttaggtccacagtttataaaacttttttgttgacatcctagaaatatagcatatagcatataggagctggatataggagacaggataattcaattgattaacaggacaagttgaattcaagaataattctatacgtacatcaattcaagatatctatctgatgatgattgcactttcaaagaggataagaaaaatagagaagatagactcgaccttattagtaaagagcatcacaaaaaaatgatgatgaaaatcagaacaaatagaatggaagattatttaggtgatctacgaattaatccagcagagaggatatgtaacaacagctgatattttgaagtatctaaataaaagttcaccaagcgtgaccaagatgactaacaaattggatgaaaattattatcttatttatgaaaagtagaagtttaaagctttgtgggtaggaatcaacatcgtacaaaacatccaataaaaacactggttgcttgcctaattcttaatgatgatgttgttcatttagatgtggaaggcatagagcgtcattttcatacacagggataaaaagtctagaacagatcccagttctcaaaaaaaatcaaacaaacttcattaatgaacatgtaatttacatatatagcgaaactaatgctatgatttattatggaaatggaagatctatatcaatttttaagtatgaaatatctactatccctttattaacaggagacgaaatttcgctagatttttttgcaccatcaccattacacaggtttaagaaatcacaattattatgaatagtttggttaaggtcatactttttaatataataatcagatgccactggagattcagagtaggtaaagtttaagaaagacccgtttaaggttaagactaacagtaaagatgatgcacatatggccaaaattgtaactttcttaaataagatcatcttaacttgtaatttattttgaaataaattataattgcatttccccatatagtgctgttattttgattctaagggatatactagaaaaaatgatatgcaaattaacaaagtaatatgaattaaactattatcagaatatatttattcgtagaaaaaaacctgatttcatttactagtatttggcatgataagaagtataaatcgtgaaatttgattcattatgaattttaatagattaaaaatatgcacttagtgacccattaccacttcttttatttatttctcaatgatcggtaaaatattttttcggattctccactatttctactaaccaaatccccccatcccgaatcattgaactacttagagttacttttgataacccgtctaacaataattttatctaaatatcaactcgatctaaatattttaagtccgtttgtttatatgcattacaacataacatcaaagacgtgttatataaataaaatagattaaaaaaccacctacaaagaactttatttaacaataatgattacatataggattttaaacttacatattttaagtttagaatcaaaagcaaataaggcgacaaagtaacatcagtattactataattaggaaagattaaatgttcgtaacaaaacaatagtactggtaaggataaggagtacagagtggtctctatctcagattggaaaaaatggatcatatacaatttaattggtgaaggagtacataacgttctctttgaagaacagattagaaagctttctggtagacattttgatgagaatttgatttttgcattaaataatcttgtggataatgggttgctacttaagttggaaacaaataaaaaaagaaaattcattgttaattatgaaaaactgattgacgcacaaaagattttaaacgataatcgaaattggaaattaagtaaaatttctggaattgaagacgaaaaatggcaatatggctcaaataatattaatcaattttacgccgagccagaagggtatagtttctggttcaatttggaagaaagtcctcgaaaaaaaaggagtatttataatatttatcatcggaaaacagatgatcttgaatttgcagctcaaataataacccaaaaatactccaaaatattatatttgggatcacttcgacaaaatcgatccatcatatcacggctttggaaggcatgtcttgatttatcagatgagaagataagaagcaatggggagtttattttgcaggatttacaagataaggaaagaaaagcttgtggtaataataggcagcgtggaaaaatagccttggtaatatttagaaaattagaatatgtggaagagcatggcaaaaaaggtaattcgacaatatttagaatcacagggaggcttccacctttttccacattggacgatctaacaacaacctgatgccaaataatttaaaaagtctcattagaatgatgaaagaagcgtaagcctattattaaatacctaactatttttagttatggaaattctagaggagaagatacttgccaagcagatatttagaaaatattcagaaaaccctagaaattggaatttcatcatatctacgaattcgatccgcgatggtttttttgatgcaacagtgacaaattctgacgaatcgtggcaattaaaaattgattccatctataaaccctccccgatcataacgggtacaaaattggatattgatcctaccaagatgaagaaaaccgttgatcaagatatcattccgtttggatataggaaaatagatcctccagtctttatgaatatgtttaggaaaatttctgaagaacatgaaatgttgtccaagaaaaatacagattacattaacagggaattgaatttgatgttgaattccttggaaccaactgtgccgacaagaggtacggattatctttacggtcctttcctatatactagtaaaaacttaattggaaagagcccgtatcacgacatagtatcagaaaaattgacttcaaatatcaaaaagaaaataaaagagagatatcccggatatggataaaaagaattgaacggcaagacggacttcttaaaacttgaaagtaaaatattgaaaaataaccctttagaggatccgtatgaaagggacgtaataatttacactccagataaatactctgcaagtttatcggcggggtatccagttatttttttattaccctctttcggaaatgataattattccgccattagttggaatcctttttcgattcccattcatgagagattggagaaattggtcctagatcaaaaatgtggggaaatgatcattgtagttataaattgttttaacagactaggaggtagtcaatatatcaattccgtggctgtaggcaggtatgaagactacattatagatgaaattattccattcatagattcaaattataacgtttcaaaaagagctgttcttgggaaatcgtctggcgggtttggagctctttccttagggatgcgaaatccaaaaatttttagtgccgtagcggcacattcatttgattcagcgtttgaatattgttatctaccagatcttccgatcgcaattgacgtgttaagaaagtacaagagtcctaaaagatggcttattgacttttggaataaggcgaacaaacacgataaaaaagactttactacactaagtattatttcaatggctgcacactattcaccgaatttaaataacccagaattaaacacagacttaccctttgatatagaatcaggagaattcaaagagaatgtatggaaattatggaaagaattcgacccaattaataaagtaaatgaattttcagataatctgaaaaaaatgaaacttttgtattttgattgtggaagtaatgatgaatttaacctgtccataggagcaagaatattcagtaaaaggtgcagagatcaaaatattaatcacgaatatattgaatttgaaggaggtcattttaatacaggctatagatataatacgtctttacaaagaatatggaatgctattggatgaatattgggatcgaaatgattagaagaacacaagctttatactggtacataagatttgactttagaatcgtgggcaactaaactaaaagtagtaacacgaatcccgatccactcacaggatgaaaacacaaatgtatcatcatatcaagacacagttaaactctacagtatcaacgtctcgatccatttacaactgaaaaggatatgaaattaagtttttccaatgtctgattaaccaacaattaataagacattttgtaaggtgtaagtaaacaagaaatttcaataagggatttcaactttattttataattgtaagccaattacgtttatccgggttatttcctctcactatgttttcaaaattttgttggatttttcttgtaatgggtccaatacccccatcgcctatgaccctgtgatcaatgaatccaactggaacgatttctgatgcagttcctgtcaaaaatatttcatcaaagtaatacagttcgtccctagaaatgttatcataacaaaggtggatatcattctgcctggcgatttcaataactgtatctcgggttattccttcaagggctcctgtagaaattggtggagtgtacaagattcctccctttacaaagaagatattttccgcgcttgcttccactacaaaaccgctagaatttagcattattgcttcatcgaacccagatttcaaagcttccattcttgctaacgcagaattagcataatttgccactccttttgcatgagtaggcattgactttattcccaccttttcccaagaagataccataatgtgaataccttgctccatgtcttcttttttaatatgttcagtccatttccatgcagatatcgctatggataccctattgggtaaagggttaacccccaattttccataaccataaaacgcaatgattctgatataacattcgtctaacctatttgccttaactacttttactgtagcccttttgagttcatcaaatgtatattcaaacttcataaaataggcttttccgctattaaacaatcttcttatatgatcgtccagtcgaaatatattaataccttctgcagttttatatgaacgaattccctcaaatacaccggtcccataatgtaatccatgagtcaacacgtgtaccttggcttcatcataatcaatcaaatttccattaatccaaattttatcactttcgatcataaacagtacaccagaataatgtaattaatttataatcgagccttttgagtgtattgatctaattacctcttcaacattttggtcttctactaggataagaattctggaagtctcttcttgtgcatctatgttcaatatattaatgtcttgctggctaacgatactactagtgtcagaaactattttagggattttccacatagaatctccaataagagtaaccacacctcttccatataccatttcgaccttaggataaaatgaacgaaatatcttttcgtgtcttcttacatagtcgccatccaaaaataggaaccttgtcatttccaaattgtcttttttatatggagataatttaataaaatcatgatattgtctttgcttctcaaataatgcttcaatgtgagatgcagctatggattccattctaacgatagcacagttttttttaccagttacaatcttaattttggcttcgatttcgagttcattgtctgacaattgttttagtatttgtgtataattagaagggttagaaatattagtaactaaaatgatcaaatttaggtcatgatcgtctatgtctttaatagcaattggatccaaaatcttcataccaaacatgcctgcgagtttagcttcattataagaaagggtcttcacgttgtgaagatttttagaaactattttagggtccgcacttaatacggaattatctttttcaaaatcaagaatgacgttaaactgtgatgacaataaaatccccaaatccgcagctgatctatcagatcctccccgttcataagtggtttccaggccgtctactgtttttccaataaaaccaccaatgcataaaacatcattctccttaactaatctgattagtgaatctacctgatttttagattcgtctagcaagaaactagctgcttcgaaattatcatctgtaactatcggccattcatttacgttcacactagatgatttaataccgttactttttaaaatataatccattaaaagagaaatcactatttctccactataagcaagaatccgtgaacgacttacgtcaacaaatcggcgattttctgccacttgcttgagggatattaaaacagtcttgttaaatttctctaactcagattcaaaatttagtctatctgcattagataaatatttatttgaaatttccaaatagacggtttttagcacatcgatgtctaccggatttgatgaagcataatttttcgaaatccggatggcaacatccgtcattgacatattctttccttcataatttgtaagaggagcagaaaacacgcaaatgattttagattttttccttagttcttttattctatcgattatgattgggatctttgcgccatttactcctaacgctgatccgccgaattttgcaattactaatggctccaatacaaaaattaatacaatggcctgttattatttattcagatattcattaatcagcttcgcagccttggcaaccccatttgacatcattttttctttttttaaacgaagggctaaaagattttcttcaataattgaatctagcctattaatgtcctcgtatgaaaaccccatttctctggccctgtcctcttgctcaaaatgattcttaattggaataaaaataccaggagtaccgtaaactaagctttcatcaattgtagattttccggctaatgatataaccaagtcggctgcgtatacatattcatggatattgtttacaaagccgatattcctacaggatttgtctcttttatcattatgtgaaatagcagatgaaaaagatattaccaaatcgcaatcaaatcgtttctgtagtctcctaaaagattcgatagtcctttttgttaaatagtctccagatgaagttcctcctgtagttatcaaaattgtaattttatcaaacgaaaatctctttcgcaactcatttcggcttgttcttatgtctctaactatcggacccacataaaataaattatcgcgattatctccagattctgggataacaacacaatcactagactttatcaaattgcacatagatttgttgaggtatttttcaatactagacaataccccatttcttataaaatgagtcccaagtatatcagtaataaggattctagggatattgagatccttgccaacagatagagaagcaaaatcctcatcagttataattaaaggatagagatctaaatctatgcgactggtagaaattaatttctttgcttctattttggattttcggaagtaggataaatattttagtaaccatacaaaactgttttttaatctcccctcataaattgaaaattctggaggaaaatacagattatgggcgcggaactttgattctcccgaagcatcattctcattacatataaaatcaaaagcttttgaacccgtaacgaattcgaagtcataataattaaatgacttggcaatttccttcacaattgcaatgtctcgtgttatatgtccaagtccaatcggacttgaaaaaaataatgtcatgtagattattccgtcaggatataaggtagaaataataaaaacaatgaggatagtttcaaatctaagttattttacgagcaaatgttaagtttttcaattgactttatcttagacatttgaagtagctgtagtagtcaaatcaaaggaattatgagtgattttttattaaacaattgataaatttggtaaaattcaccaactggcatggatttgataaacaagttgtttgaggcaattcaaatactagaattagcagttctaaggacaaccttccattttttgaatgtagaaaccagagtctttaatgtcttttgctacaactggcggagcctcttgaatatgacagaactgacattcctcttgagtcattttctgccctccttgatcaacactgttaagatactccttaccgtattcgattgctttttcgtgaggagtatttgcttctacaatcacatcaaaatgcattattcttccatctttttttgtaacatatgtatcatatactgcacattccatacctttttttggacagacatcatatttattttattacatcgttatctaatacgaaactgagattttgataaaagaacaacaaaattcactatgatcacagtttcataaacgataggttatagccatctgtaaactgatactctgcttctttagacgtatatcacaacacctttagcttacccttttaaactaccatcattatgagagatactttcctcgaatcgattactgatcttaaaagaaatacgttgtatgatatgatcgagtggaatgataaagaatccaactaccgtgcaaagattatcctgcttagagaaatggatacagttcgtgagataaagatggcttggctaccaacaaccatcatgatatcaacatgaaaatggatacatcgattcaacgagaaaggtattgaaggaatcatatccaaaatacaggataggtaaagttgtatgtatgtatctgactgacatgctactataacaaaaagcatggattcaaagcaagcattcaatcagtttacaggaagaaagcacacatttgtttacatgacccaaacccaatcagaatcctgtccatctctattctactagtccaaatcccatccaaaccttgtccatctctattctactagtccaaatccaatcagaatcccctcaaaccacaatttatctctcatccaaacctgtcaaaatttcatccctttacagtttacgcgtgtttaaccgacaaactttatggaagtgtttatttcatttataagtaaaagtttatataataggaatgtacaattatgggaaaaagaataccaaatgaaattaaaagcaaggttctttaccagttgctttttggcttaccgattaatacgatcgctatctgtaatggaataggttatggtagtgtatttagaatcatgcagttatttaaatccaaaattcctgacttggatgtgttaagagcagttgctgtaaagataaaacaagaaggcttgattctaaatgacgtggcatctggtatcaggataaaaaattttttagaacaaatgggatcttcagagagagagatggaaagattactcacggaaatagatattcattgcttcaaaacaaaccaaactttttcaagttttgttaaagaaatacatgaaattcatagattcgcaaggggacttggaatttctattcaccaagtctatgattatgttgaagataagaaaaaagaattacgaactttgcaaattgaactagacaatataaaatcattaatcctagagaaaaagatcgagtatcatggttataataaaggctaactcatttgggagttctgatagaatagagtgtatctctcatagtaatgataattcgaaatgtagctaaatgtgttgcggtgcggcgtcataccaaaaaagcataatcattttacagatggatatatcttattatttacacaacttttatggaaccaaggtaattgtctctacgtaccagcagcctagatctaaccatgataagaaagcaattgaaaataccagaaaatcactattactagcaatgaaggagaaggagcgagagatcctacttagggaattcttactgtatagatcaatggttccttatgatggttttgagcatcttgaaaatgaccatagttaactccttcacaaggagttgtatatggaacactagaattaagcaaggcagaaattatttcctcagatgtagcattaggtttaatgcttttatataaagcggcctgtcctgcaacaacaggggctgccatacttgtaccactatcaaaagcatacccttggtccctatatgtcgaaaatacattcacacccggtgctgcaaaatcaacactactcccataattactgaaactagcagcataatcatcaggaccaccgatggtactattgcccctaccgccacattctccgtcactatcagatattgcagaaactgctattactccaggaattcttgctggagaagttaatgacgtgttaatattgctgtttcctgccgctaccacatatatcaacccctttgagagagattcattaatagctttatccaatttgtttgatggcggattctcaatacttaaattaactatatctatctcatctgaatgttcatcaacgtactgtatgccctttatttgagacgatagagggcaattgccgttaacatcacatactttgatggcccaaagtttagccccaggtgcaactcctaatatcccgattgaattatcttttgctgcagctattccagcaatatgtgatccatgacccaagtcatcattgccggttagggccccctctacaaaagaaacattcctgtagacattcagatcgggatggtcaaggtttattcccgtatccaaaattgcaatatcaacatttgaaaaatccaattctcctgattgtttgagaatagtatcatccaataactcacttgtgatattaatcacatttgcattgattctttcaagactatcggggatggtttgattgttgtatctaacggaggcaatctttccgtttaaatcttgattaattgcaaaaatccttggatcactactgagttttttcataaaatccatttcattaagatgtccactattattcatattaataacaaaaccaggtggattttcaaaaacaaattttatttcaccattttggacgtaatcttgcgacactagtgctgcatttgtggtaacattttcatctaaccatataataaattgtgagggtatgggttcatatttcagatttggaacaaatgtcctatcaaaaacatatatcgtaggaaaggaaaagttttcatttatggaaatatcaaatgacttgatgttattaacgttgttttgatcaaggatttctactgtataccaagaataatctagcccatttagggatatcactgagttattagaatcacaatcgaaaaaatcattattcacaaaatatagtgaatcatcatttgtataaggattaggagacattttgtatacttgagaaaaatcttgatcggtaatgattgttaatgatcctcctggaaaagcatcagttggattagttccacaatccttcactgctgcttggaattcttgttgatcaggagtttcaggtggggtatcaggagtttcaggtggggtatcaggagtttcaggtggggtatcaggagtttcaggtggggtatcaggagtttcaggtggggtatcaggagtttcaggtggggtatcaggagtttcaggtggggtatcaggagtttcaggtggggtatcaggagtttcaggtggggtatcaggagtttcaggtggggtatcaggagtttcaggtggggtatcaggagtttcaggtggggtatcaggagtttcaggtggggtatcaggagtttcaggtggggtatcaggagtttcaggtggggtatcaggagtttcaggtggggtatcaggagtttcaggtggggtatcaggagtttcaggtggggtatcaggagtttcaggtggggtatcaggagtttcaggtggggtatcaggagtttcaggtggggtatcaggagtttcaggtggggtatcaggagtttcaggtggggtatcaggagaaggaataagcacagttacagtatcaggatcactgcttgcagtgtcactacttaccactaattggaaggtaagtctagtttcttcttctacttgaggggatgtaaatgttggatttgcagatgtcgggttattcaggatcacctctggaccaccagtctgtgtccaatcgaagcttagagatggacgaacatcatcaccagaattattagggtcatagcttttgctaccatccaattgggtcgactcattgctttgtacagttgtatcggtaccagcattagcaacaggttttaggattgtagtaggtggagtaacagacacagttacagtatcaggatcactgcttgcagtgtcactacttaccactaattggaaggtaagtctagtttcttcttctacttgaggggatgtaaatgttggatttgcagatgtcgggttattcaggatcacctctggaccaccagtctgtatccaatcgaagcttagagatggacgaacatcatcaccagaattattagggtcatagcttttgctaccatccaattgggtcaattcattgctttgtacagttgtatcggtaccagcattagcaacaggttttaggattgtagtaggtggagtaacagacacagttacagtatcaggatcactgcttgcagtgtcactacttaccactaattggaaggtaagtctagtttcttcttctacttgaggggatgtaaatgttggatttgcagatgtcgggttattcaggatcacctctggaccaccagtctgtatccaatcgaagcttagagatggacgaacatcatcaccagaattattagggtcatagcttttgctaccatccaattgggtcaattcattgctttgtacagttgtatcggtaccagcattagcaactggagaagcattttcagaagagtccgtgggagaactggagttgtcgccttcgtcaaattctgtttcaggtgtaacttttggagaggagcctgtgggagaactggagttgtcgccttcgtcaaattctgtttcagaatttcttgttgttccaaatgctattgaaacatctggatcccctattgtcttaaatggaataaaaaaatgaaaattaaagacattagttccagagaacaaaaaaatgaaaaataaaacaagaattaatgctctattggtcatctagttttcacgattgatcatattttgtatcaaaaaagtcattctcgatctaattataagacaggcatatgacgtctatcgctatctaacgaaccgggaaatgaagttattgtgccatttaggttattctcggtagagttggaatttgtcagtgtagagttggaatttgtcagtgtggagttggaatttgtcagtgtggagttggaatccaaattagcaataacattcgacatggtcaatgaaaatagcgagaggatcaagagaaagctgatcgaaaggagagcaaagtaattatatttatcgtatttggtgtagttttttattgtcatactatccattcatatcataaatagataaattttgtactgaatttattaaactctcatagtctaaaattctaaaagtataagaataatagaaatcatttaagagattatgaaaaattattttgaaggatattattgcagagatgaccttcatttacaagtaattaataaggacagtaatcggaaaattctaaatgcactgagggaggcatatcctataggtctatcagtcgaggaattaagcgaagttactaaattaccaataaaaactgtgtacgctcagaaggccgaactctatagagaatattacataaatcacgttgaagaagaaaagaaaaatcaaagaggtagaccatctaagaggcaagatccttttatttttcgtaaaagagctcgactagtaattgaggagttatttggagtgcacgatatctatgaaggcaataaaccggttccattacctcctggacataccatttattctgaagggtttgcagaaacgttaagtaagctgactctaaaggaggagaagaatgaattattcatcactctcttagattacgcgagaaaagtattatctagggcgtataataacgaggagatcaaagagaaatgggcgcctagtaatgatggaaattactgttgtacccaatgtggtttgaaccatgaagcgcgtgatttttttcgggcaatatttctaaacttgattgatgaatttgagcagagcaagtattttatggattttctcaagaaccaaaacatggtaacccaacattcctatgaaaagataggggctatgatagaataaagagcaaaattgcctcaaaatgatatcaagttattcattatttcatgactgatttgatgacatttcgaattagcaaggaggagtgccctaatcccgtcaatattgatttaggtccaggaatactttttccatcttagttagataattgaagtatacttttcaaaatctttgtatcattattaatcttattgtaattagtattttatagtaatgtccccaattttaatcatgggtaagccttgaatctttgtatttaaaccggataaaggaccaagatctttcgttatgaataataaaagaaatggctcaagttgtttttcgaaaatttcagtgcgtatgaaaaaattatcgactaaaaattcacatattagtggagatttgatgaaaataaattaaaggagaaatgattattaggataataattaatttatgctattgatttggagaagagtcaatgtagactttatatcatcaagtcgccttatcagaaggacttttctttgtaaatcctccttgtcattggcgttaaccttaactataatatcatatacaccataaacacgataggccttatccacatattcaagatctttaattagttccattacctttgcttcacttccaagagtacaattgatcaaaacaaaggcgttatgcttcatagattattcaccttgggtattaaataaaattgttgtccttttgacaaaataatttattttctccgtgcagttatagtatgtgtatgatctacataccacctaatactatccttaaaactagaccaccaatccataaagccgtcactggtttctgattcaaagagtaaaaatccattatattctgtaccccatgcatgactatattcacctatcaattcaattccttgtggtaaactccgcttcatctctctccactgttcattagctttttttgcttcttcaggagtcatagttttaaatctgtagaaaactaggaaggtagcactcatatttttttattatagcaattagattttaagttttactaatgcaatattgcaggtagcaattgagatttattaattctataccaagatttaacgattacaacgacttgattagaaaaaatactaaaggaaaatcaaaggaatgaaatttaacaagtacaatgtcaggcatttacacaaaatattaatacataaaggatcatacatattttaaatgtccgtttttgtaaattataactattcttttaattcgattttgttagaatgggaaatttgcagtcattgttgcctactcttttatcggttttccgagattaattaaattggttcatactatcagttaaatctttgacaaaaaatgcacataaacactcatggtatcagtttgatctttattgtaataacatcagcaataactttgtcatatacgttgtccagtgagggtttgacatatggtttggattttcccaagaactatcagaatgtgatttgttctgcaaattcttcgtcttacattggatttatgatggaaaataagattagtcaatacaaagctatacttggcgagccaacgtctttctacacatatatagaagattccaatacttattatcaaaactttacaaacggtgcgatttactggacaatggctttacctagtgatacaggtgatatcccattaaagactgttccttatgagattgatggtggtatatataataaatggaaagagatggggcttgagagcagtttcctaggatatccaataacagacgaacagtatacaccgtataaagatggaaggttctctgcgtttcaaaagggagctatttactggtccccatcatctggtgcgcatgagattcatggcgatatatttaataaatggaaagagatggggcttgagagcagtttcctaggatatccaataacagatgtgcaaccattaatgaatggagatgcggtgagctattttgaaggaggtttaatacgctggtccgaaaaggagaaggaactacatgtcctagacgacagtcaagttaacttcgccactgatgtcctagctaaatcacctactaattacactcaggaaagaataattgatgatttacgtcttagcaaggtttcagggggtattgaatttcctacttcaatggcctttttgggaacgaatgatctactagtgcttgaaaaaaacaaaggcacagtaattagagtagtaaatggtacccccctctcagaaccacttgttgatcagaatgtttcaacgcgtggggaaaggggaatgctaggtattgctgttgcaaagagtgataagaatttatcagcttccaaatatgataatttaaaattgttaaacggcatccataatgacaacgaacctaacaaaggtatattgatgactacagattctgattctattggttccaacacatttgaaaactctagtgatattaagctgacatccatcattcccagaaatggaactacatttgcaagcctcgataataatgctacaaaaacatatgttttcctttatttcacccaagctaagacaaaggacacatcagacctatgcgaagagaatatagaaaaggagctggtgggcaacaggctatacagatatgaattaacagataatgatacaaagttatcaaatccaaagcttttgctggcgcttcctcccttgcaatcaccagtgcataatgggggaaagatgctaattgggccagatgattatatatacttgattgtaggggaccttcagtcacacaattctacgactcaaaacctgaagaaggcgaataaaactgacggtacaagtgttgtgtatcgacttacttttgatggacaccctgctccgggaaatccttttagaaacgacagtaacactgttggatcattcgacaaattctttgcatatggtataagaaacagttttggaatagatattgatcctttgacaggaaagttatgggatacagaaaacaacgagaataactatgatgagataaacctagttgaacctggatttaacagtggatggttgcaaatacagggactttcaaaacatcatcggaattttgaccctgacttatttcttgtcaacagtcttgtaaatgggagtatgaagggaaaatatatggatccaaagtttgtgtggaacgccacagcgggccttactgcactgaagttttatagtggagataagcttggcaagcactattatggaaatatgtttgtggctgacattaacaacgaaaatctttatcgttttgagttagctgacaaaagggatgatctgatgctcaccaggccatactcagaccgcgttgctgataacaggactgaagtagaacaactcgctatagctcaaggctttggcagtataacggagattcaacaaagtcctgatggatatatgtatcttgccacaatcaaggaatattatccaatgataaacggcgatggaacaatctataaggtggagcaaaagtagcctattcaacgaactgtggcgaatattttgatagatatctatatgtgttatatcaaatagccttataaacttgatatggaaaatcaatatttatcgatatttaaagtttatcaaaaaattgtaatcatgtcattaatatgattgtaattgaaaatgtaatcgcagaacaatgtacgaggatgtctgatggctgtttgttgaggtgataaaatacggcgctcttattgtatggagcagttactcacttaatgtgattctaggcatagtggggagatttacttataaagtaaatagaagctacataagaacagagaatgttgagctagttttggtgagtgttgcaagcagaaaggtcagtaattcactatttgaaacggtgaagcatacgatcgtgaatacctccgatcttccattaatgtggtcattgaaagagtagatttgttactagaacttcaatctttcattagttctttacaagaagacagaaaacggttagcggaagttaatttaactgtggtacctagaggatacagaaaagacctaatcgcaaaaggcaggacgatgaactattttattgagaatctagtcagacgcaataaatggtacttattctttgataacgacaatcttttacttgacgataatttaataaatgtggaatcatctaattacagtagtattaatagttttgtgcatttgcctagtagccgcatatgagtttgttctattttgattcctttttgatggcagctatagcagagaatgcagtctgttttttacatatgcgtgtttattacctgatgcaattcctatagctcttccagtgacatttggtagaaagggtgaggctcatagatggggagatgtatagcaagattcaaaaatctcctttcgttcctttgctcccagctaatctattcatttttcttaacataaactataagtcaaatttgtttgaattacaaaacaacatcttaaccattgtatgattttaaatagtttgtgatttcacctaatatgatgaataatcacattcgtttgaacagcgaaattttcttttttgcagtcattgtgataacattatcaatattgccagtagctggacttgtagtccccaatttcgtctttgcacagagttctcccactccggcagctagcggcggtactgagagcataagtgtatctcaggacaaatttggtaacatttacttggccgatggctctagccaaaccataaaaaagtatgacagcgcaggaaggttcttacagacaataggctctcaaggtactagtggtaacggaacatacagtggtgcactttcacttaccacagatgtatttggaaatgtgatcgttgcagacagtggaaataaacttattcagatctttgatggctccggaaaattgctaactagttttagcttcgaagatacatttgtctctaatactggaagtgcacagaattctacaaatactaacagctcagcaccaaatactaacagctcagcaccaaatactaacagctcagcaccaaatactaacagctcagcaccaaatagtagtggttcagcaccaaatagtagtggttcagtctctttataaggtagtagtataataacatctaccgggccattccaatgatctttacattccttttttactacataaatacactattataaatttaaactgttgagtatcaatcaaaaaatttctcgtatttcttctacctatcttggataataacctgaatttctcaaaaagaataaatgatccattccttgtgtttcgcagtaaattatgaatacgtctcagcgtattggtcattacttcctctattaccgtgggcaacaaagactacaacaacttggtatttcatatattattattatgactgtcctccagtcgaccatcgcatcttgtgttttctttcacagttgaataaaggcaaggtatgtgaatatctatgctattggcttgtcctcattgattggaaaaatatttctctgttgccaagcgatgtatcctgccggatcatctatacgttttcatccgaagcgatgagaacctgattcattgacggacctgtattgctgctaaggttaatgggtgcttcaaatgtgaatccgttgtcgaaacttctgacaatcattatctcagagctaccggtcgaagtatactccaaccccacatatacattgccacctgaagctgcaatttgtggatgaatagaacatccaccggtgttactaatgttaaatacactatcgaatatactttcactatgattacttatggcaagcagaatttcgtcgtttccaggagtgttgtcttctcaccccacaaataccttggtgcctgaagatgaaacggagggactaaatgaaggaccaatcacagaaaatggcatactcctttgatatgtaaatgtcaaaaatgtcttggtcatgcctaaaggcgaggaaaaagtcagacctttgtctaagcttttagtataaaaaatgtcagtaccctcccgcgttctatcttccccgacgacatagaccccattttgtgaagcagtaattctgggagaggatggaaagattgtattattactgaggacctagggctactgttgatgagagtaatgtcatatcaaccttgaaaggtataggagtaagctctgcgaatgcaatggaaatagtggaatgtcttaaatctcttggattcaatgtcgttccataacatttcattgttcataggaaaattaatatattacatcataaaaaactcctaaattattcctagccattcaacagaaaaggcagaccttttttattattgacaatagtaattattctctgaacgaaaatataattgaaaaattggataaactgcaaaagtttttgagcttttcgggcaggtctgctattgtaagggccagtgtaagaaatttactttttactaaattctacactatgtagcaaaactttcttttgctcgttttattatgatctttaacatagcacagagagaaaagaatggtctcttgattcatatagaaaaatagtaccttttcccctcattcaaataaagaattatctgaatttgaaatcaacgttagaacgtgtctaaatgaaagagtaataggttataatcatgatactttatctaaacaaagggcaaacgaagatagtgctacggttaatagatctaatgaattatctttgctatatttttctctatgctttatttctctcagaaaactcatacagtattttaatttcaggataggggaaattttgaacaggatctgattaatcatattagaaattcattctattcactcacattcgggttagataaacgaaacaaactcagtttcgacactttgtttaatattatgaaggataataataaacttgggattaaatatgcgattaacaaaagcctacaaggattccatcctgtaatatgtcgaccgtgtaaaaagacatatttagaaggtgctaaaattaagaaatgtaccaaatgcggagaacgagtagacaaagtaagaacctccgtgaggtatttacaaaacaggctagaagatgttgaaataaaggtattagagtttcctactagtatttactattttcttgcatttacaattgttgtcagagatgatttgtttagagaaaaaatccatatcacgttcatattaagagttgataaagaaatcaagaatcagatttataatttactccttaattctattgaccagaaattctaatctccttcttgatcttaccacaagttcggccaacatgcctataaccagtgatagtattccagttactattaaaagagccgaaagaactactgccggaatagaaacgatctcatcaaaaactatcttttcatacaacacttgagtagtaggccacagcgccacagcaaaaaaaactaaagaaacaattccaaaaaattttaagggattcacattcattaaaataaataaaagtgtgctgccaattttaatgccatcacctaagggttgtaattttgtctttgatccctttctcatcccataattaattggaacttctaccactctgtatcctttagccaacgcctctactgtcatttctacctcaatttcaaatgcatcactaaaaaggacaaggtctatgaactcttttttatatagagctcgatatccagaaagagaatcagtaattgtcgagtccattgcaaaattaattgtacggttaaagattctattaccaaaacggttgaaaaatgagatagaacctttttctcttttgctcttaacccttgatcctacaaccatatcagctctaccgtttaacaatggttctagtagtaatactagatcacagggagaatatgtgccgtcaccatctatgaatacaattatatctgcttctgactgaaggacggcttctcgcattccatttccttttccttttcctttttgaattatgaatcttacgttttcttttctacatatatctagtgtacgatttgttgatccaccatctattaccactatggacgataccatagtcagagcaggagcacgtatatcacggatcaagtcacctattgtatgttcttcattcaatgttggaataataacttctatctttgtatctatattcaaatcctttaaattcaatttatcagtagatagtttatcttgcaattaactatacatatgaaatggtatactatttataaacaatcttatgaccattatcatattgaaagtatttgtatattaatcgtaagaatagataaactggctctgtaaagttaagctctaaggctattgatataatgatatgcgaacaatttcatccattctttgacatgatttaacttgcagttttgttttctccatggaaagcagtcatcaaagcttcctgtcctgtacttgatatactcaatcgttctttctatcaaacttttctccaaagaggaatgaatgtgagctttattttaaaaaacgcacagtattgtggatatcatgtaccaccatctgtggaaactggatgttttccataatctttgaaagtctgataagaatcgttctgctacaaacatgtttcattctttagatatagttagtgcgagaatttgactattttcggtctccatctttaccaagccaaataaattctgaaccaacctttatcaaggtttcttcaatgatatattcgtcaattttctttgtctttgatgataacctctgatgtttatacttatgaatccaatctctgattgcggtattgactttttttgacaaatctggtaaggctttagaagttttacttaaggaaagaccatcaaaatatagattagcagcatgataatatcctcaagcctcgttctattccttattatctgataaatcatgaataataagtgcgaattaaagctatatatttttcgttacatttacagagcctgataatggttaaagcagataaaaatgcttctttgtttgatttaggttgtaatggatctctgttcatgtcatggttaaaaaaattggctttggaaatttgtatcttaaaaaagaaataccatccaaagttaatgaaagcaatatgtttttagataaaaaaagaacatttaccaatattacaaatgtatgaggatccttcaattaatttatctattcaaaatacagagaaactgatttgcatgacagcaattttaactaataatgtttcaaaattttgaaaccgtcatactaaaaaaaggtttacctttgatttcaaccggttattggccaatgaaaataattaacgagacttttactaatttcaataacaagaaaagatctcctcatagaatttttagtctggaagaaaaaggaaatgaaatcagccttacggctcaattatatggtattaaccttattgaataaatagattttaacgatcaagacaaagttgcatcggaaagacactggattaaattatacgttcatatttattattttaaagaaaattgtaggatataaattgaatcgttggaagctccgctgatatttctatacatatcaaagtctaattattataaagtttatttcaatcgaaagcctaccaaatggtaatacagaaaaagcacattcaaaaaatataggttagcaattagtaaaaaatgatttatataatctttttttctaattaaaattacgaaaaagactatttacggaaagtgcccgaattgtaggacaaaaggccaacttgatgtaatatccaatagtcctggaagggaaaaattcaaatgcaattcatgtttccataaatttggtatggatgaattatagattctgtgtcatgtaataatcggttcattttattattacttagtttagttttattgtaaattaaaaagtcatacttttgtatagtattaggaattacctaccaatgctaatcctaataccttctaatagcatttatttgaaaaaaaaggtaaatatacctggaaaaatgtagaatcaatatactattaaattgcactattttcataatgattacaccaaaaacatcagtatttcttctaaatagattgattatatcaaagtgtttttggcgtgtttcgttattctgaaaagttttatttttctattacaagtacataacagcctactcattctcatttataaaaattatatcttaacagttaactgttcatggtaaattgagacatgcccattaaggaaattgtacatatcaatcgacaaaattgagtttactattataaatagattagaatatgatataattactatagataaaatagatttagttcatcaaacaaataatccaaggctatcatgcttctcatgtacaattctttgaaacgcttcatacattagcatcgaaacacattagatctttgaattgagggtttatcacatgatagacggataaaaaattgggtctaaaaattgggggctatatatcatcatgtatttagcatttggtagaaaagtgtaatttgaaatcttcaaaatattcatgtcaagtaatgctagttgtgtctctgttcatttaacgataagcctatagcttgaagatgttctatctcttctatgaacatcagaaacagaataccttctttagaatatgtttgctatggtttgtattggtatttttcaggcctgtctcttaggagagcatctgaaagactgtctcgtttgatcaaacggaatcatgtatcgatttggaattagattcaggcatactatcctctaaagatatcagaaccctagttgtattaagaaaatttttaagatcccttctgataaccaagtgtgtggattcttttttctttccataatgtattatttgcaattgttagtcaattgctcatttattttccattaggatatttaacaataggagaaagaatcaagaatcagcctttctctatcagaatgttaatatctattatttttggattacctatattaaccataattttaacaattataggtttcttttatattggagccatcaatctgattctaattaccattatttcatatgtaatcctaataatttcatctttcaataaaaaaagaaatagaatgcgagtgaaaaggattcgcaccatcaatttaactaatcccgactttatagtgaaaaggattcgcaccatcaatttaactaatcccgactttatagtgaaaaggattcgcaccatcaatttaactaatcccgactttatagtgaaaaggattcgcaccatcaatttaactaatcccgactttatagtgaaaaggattcgcaccatcaatttaactaatcccgactttataattacatttttgatggtcttgataatcattatcttttctaatattacgagtcatatgggttgggctccaggagtagatagtattaatcacggaatgttgacgaatttgctgatatataaccagaagattacatcgaccttagaacctattgctcctagtcaaccttggttcgagccttttggatttcatattaattctgcaaatatttcccttttaatggatctttatccgggccaatcgatcctcttatttagtgctgttattactattcttatcataataagttgttttgtaattgtttactatatcaataaatctattacattatctttaattgcaatggtttcatgttctattatcttttctcatgtccatgacattaggttcttagaaaaatggtttttgggttttttctataatacaccttatgcaaacttgttagggtatttctttcttattcaattcttttttgtttactttgttataaatgactttagaagagatcataaaaaaaattattttgttgtattaatagtttcaataattggaattctgttaagttatacaccatttgtaataattccattaagctatttggttattaagagaatttactacttgttcgaacggtttactatatcaaaaagaataatcaaaagattgttttctcagtcatctcaaacaatagacaaccagagaatattaaagatagtaaatataataattatttctttatcgatattctttttactatctttatctaatgttataattgaacagtttcaaaattcaaataataatttctttacactgctaaatcgtatcaaaaacaattcttatttctatacatcggttgtactaaatcctacgtccttttcagatctgtcaggctattggtctatttcacttttaattttctctgcgctttctattttgagaaagaacagaatacaaataagttgtttctatttaatcacttcgttaatactcactttatcatcttttacattccaattcttaaatgacttattgtggtttatccttggtgggaggctattcgtttttatgatactattgaatggcatagtaacaccgttatatatttatgattttatcaaatggattgtaaatcttaagaagttgcagatcggaaatcatgagagggggaaattaatgttttatttacatttaataattttgttcatagctatcacaggaacattcattccatcactaatatctaatgcttctctagaacaagctacgttttggggctggcaggttgttaatacgaattttcataatgattataaattgtttgactggatcagtaacaatataaataaaacagatttgatcatgactgattatacgtacgcaagtaaaaagcttatgtcattctcgctcaataacgtaactgctattccgattccaatccttcctgaagaagtgcaaatgggcaaagatactgtaatcgtatgggataaaccatcactcttaaaatcatttgttgaaaggtataatataaaatatattcttcttgattcagattttaatcatagagttcctgcagaattagctggagtggaggaaaatgttccaagaaattacaatccctccgaatataaaatcattttctcaaatatgccatttttgttaaaaataaaagagtatggagaatcgaccctctacaaagttatcagtttgaattaattgtttattgtattgtattatttctttattagtaaaattactttctcaaataactctgacagctgtcttgcttttctacttggcatcatggcatacaatatcttggacacatcagttttatcaaagaaatctaagcgaatgtacaaaattactgatcctaataatatgattactgttgacaaaataaaatttaaattcaataaccataatggaatcgcaaaaatcattggtatgaatataataaagatgttttttttaatttccaatacttgaattttgatattgcctaatcgaaatgaaaataatgattgtgtaacagatcctacaaagtaacttaacgcagcaaatgtcgaatcaaacagaaaagttataaggaaataaattataacacgaggtatatttccaatcaatccaagcatcaaaacttctttattatgtcctaatccatatagataatagtacaccaattcagaaatgataacaaagggcattccaagcataagtattgacaagttaagttgcgacgcttcaaattcttcgccaagaatccccaaataactggatgaaaaaaataaaagagatgtagaaacaggaatagttaaaactaaggctatttttatagagtacgataaataacctagctggctattctcttcaatggtttgaatgatcccatgggtaactttactaataccagaaacaataaacagtaccactgaaaaaatacctactgctatatagaattgtcctccggcttgtgatccgtctaaagaatatacaattataacacccatccagaatccacatacattgattatatttggaatccaactagctgtactaatcgatattaaagagcgtattgttggaacccaaactgatctaggtatcttgaatttaatctttcttatgtaaaataatatagagaaagtgacgactgtaaaatacaatatataataagatattatggtactcaaatctttatagcctaaactatatagaatcgcgagaaccggaaatcgaagtagagaacccacaaatacatatgtaaaaaaatcctttgaccgcatagaagaaataaaagattctataaaaagattatgatatgaaagtaagaaaacagctacaataataatccaatagtaattattatctattcctattatctctaacatgttaataggataaaatattaatacagaagcaaccgaagaagaaatagtaaagaataataatactgacgtaaagatattagcatattcattttcatttcgttctacattgtacttagctaagagtcttttcattccaatatgaagatcaaaactaaaaatagtagtaagaattattacaaatgaaacaatagtggaggcaatccctacagattcaggcccatttattttagctactatgaaccagaataaaaatgtaaaaatagatggtaaaaaaagacccattgaggtaaaaaatacattctttttcggatccattagtatgataccccttaaattttgtgagcattaatgattaaataatttctcagctccgattctaccttcaattttatggctggaaacataccaatcaattgttttttttaacccctcctctaatgtaaattcaggtgtccaatgtagcatgttattggcccgagaattatccaatgccctggacaaagcccctacaggttttgagtcatcaaatattatattttttggatgccactttagaattttaaatatcatttctaccacatcgattattttgtacctttttccagttcctaagttaattggagtaccatcagttaccatctcggctgctttgatagtgccgttaactatatcctcaacatatgtaaaatcccgttcttgctgtccactgccccagatttcaaatggattcattttttcaacagccttatatattagcgcaataatggcatgtgtctcattctctcttggaccatatgcagtaacaaatcttactggacaacattttaaaccatattgcttcttaaaagaattcaattggatttcactcatcaatttaccccagccatattcaatatccgcacttaaaggagtttccaaatcaaaaggattagaatcagattctctcagtttgtaatcagatccgatatccttctgtaaattagtaggatagacgcaagctgtgctagcaaagactaaattctctacattagaattcatacttgcttcaaatacatgatgatcaatagataaattagagcaaacatcagcaggatgagaagatataaatcctcttcctccgtgaatagcggccaaatgaaatacgtagtgttgatccctaaacatttggaataattcatctttcgatccatattctagatctattttgacaaacttgattttatttttagattgagaaaggttcactaactttccactgctaaggtcatctattacagtaacattagcgccaaagtttaccaatctatctactaaatgactgccaataaaacttgctcctccagtgacaacgacatttttttccttccagttttgttgctgtctgtgcgctgtagatttcaacagataatgaattgataagtacctatttaattattattaaacacattttaaagttccttatttggatcatctctcattattaaattaaagtagatggtgaaaagatttttgaattcaaagtattttcagatactaaatgataagaatatcaattctatagagtttattaatcaatagtaaaactaacatgtgagtagtttatcaggtagtcgtataataagtcatatagaatttgaatgatacttatttctaagattttagtgttgtgggtataaaaaaatcaattgtattatttgtcaataatcaatttgaataaaaactaaagataaaacatctatctatatttttctattatttttaacatctccattgccctatgcttggaagtatgttcttttattactcgattatatgataatcggcccattttatctctttgatcaggatcatctaataaattttgatatattcctatagcatcattaggagaatttgcaacaattatttctttccctatgtcaaaccatcgttctaagcccgaataaggagaagagacaatgcaacaattcatggcagcgagttcaaatggtcgagaagtcgatgtcgcataaacgctagcatgtaaatctctcaccacattcaaattgatttttgatcttccacaatgatttttccatcgattaaaagataataatggaataagagtagaatttccaaggtcaaaattatagtcattcccactaatcaaaaattttgcagagactttttttgacggttcagtaatcatcgacctgatatttttttctctagattttccacccgtcccataaaaaaaaagatcaaactcttttggaccgggatcatccaatttatatacctcaggatcaactccaaaatgcagaatatccacattattggcacccatttcctttaagatattaatagatccttcagacgggatgataaaggaatcaaattcagttaaatttgctcctagataatgattgaaggtaaatcccccgcctgagggtaatgaagtaggcacatctatatcataaagcattacgggaataccgtaacgagattttatttttctagccaatcccttaatttggttaagtggtatatttaccattattactgcgtcaacgtttttttgaatgttaaggtactttagcaaagtattttctatttttggtgtggtgatggctctagcaaagaaaggtataatacgagatttatttctctttgaagctttaaaaagattcatcagtctttgcaaaatttctccttccagatagtttggattaggaatacttttccaccataatgaatcgatagcatgaccatgatatggcattatgaataactcattaccactttcagatagtcctttaaagagttgccataaagctggtgttgaaccatatggtttggttagatctaaagcagagcatagtataattaatttcatcgattcttatattaccattagatattcatgcagatatatttataaacttaaatataataaatttaaatgtatgattaaaaatgattgaaataaaaaatgatttgtgtgattgaaattgattgaaatcataactttattagattagcagattagccttgattttatttaataacacagtattgatgttgaacaaatcttttttggtaaatattggaattcttctctgtataaattttatctattttagtacctttagtgactttagtttaacaaatacagaaatcttgattgtaagtattactaacctattcttattgattgccagtttagccattcatgatgttggtcatctaattggagcattaataggaagaataaaaattaacaaaataatattctcatgttttgggggattaattatatttgataataacaatcatattaatttaaaaagtatgataattttatttttatcaggtccattgactaatattattattggtatatgtttccttatactttggtactaccataatcagttcgctggagacatgtttccaatcaaagaaactttagaaaaatctttatatcttttatttgtatataatttttctttaggatttattaatttaattcctatactcccatttgatggaggcgatttagtatatctaaatctgtgtaggaaatttcaagatagaaataaaccgccaattaaattatttttttatttaaatgaagtattctatgtaatgagtataattcttgtattttatataattatgagcagttcacagtatagcgtacttatcttaatcatctatttaatatttttgtataacgactttaaatcaatgtcaaaaatatcaaattcctaataacaggtttaatttactaaagacaatatttcaattgaatcagttctcgagtccgaaacaatgatagtatggttaaaaagttttagatcaaatattccttcaaaagaccttgtattgtcatcccattccatcgatcctacttgggttatgaaggtaccatcggaggtaaacttttgaattctgttattccaagagtctgctacatatacatttccgtccttatcgattgcaataccggtaggaaatctgaattctccgtcgtcagacccgcttgtgccccatttagttatgaaggtaccatcggaggtaaacttttgaattctgtcattactaaagtctgctacatatacatttccgtccttatcgattgcaataccggtagggccagtaaaaaaagtaccgtcgccagtaccgaattctccatcgtcagatccccttgtgccccatttagttatgaaggtaccatcggaggtaaacttttgaattctactattactaaaatcggatatatatacagagttagttgatccatcaactccaatataataaggacgtaagaattctccgtcgtcagacccgcttgtgccccatttagttatgaaggtaccatcggaggtaaacttttgaattctgtcattactaaagtctgctacatatacatttccgtccttatcgattgcaataccggtaggaaatctgaattctccgtcgtcagacccgcttgtgccccatttagttatgaaggtaccatcggaggtaaacttttgaattctgttattccaagagtctgctacatatacatttccgtccttatcgattgcaataccggtaggaaatcgaaaggagccgtcagcattcaatatcttagagtcacaagcccagtttccctctataacatcacaacttgtatgccatcttttatcgaaaatgtattcttcagaaccgtaggaattatcgaaaaaatataatgttgaaagtaaagtcaacaaacataagttacagtaaaaaaaataagatctggttgaaatgaaattcattaacttttaatgactggcagcggctttaataatatgtcttttgtacaataaggcaactggtttctaaatgtaaataagtttttaagatcagaaaatctatcatttattaagctaatcttcacttttccaagttgcttaaaataagaacccttaacttcatggaatttaaagtatttgaatgcaacgattttaatatcacgggaaaatgacataccgtcagaaaagattaatagtatctacaaaactttttttcattatccacatacctgattgggagtccttgatatttattgaatatattaatcgcaaggtttcggagagtaaattattacccattttatgcaaagtattcattgaatctttctccattgaactaaatctattcacaattaagaaattaagattatttttttcgcaaaaaacaaatactcggatatcttttcggctggatagataaagttaccatccatagtaatggttgtctcaccagaagcttgtaaaaaacccgttttataagctctttcataatccctattttctttaacaattacttttgctctgctttcttttgctacatatacaattttatcgaatgaatttccatgtacaactaatttattaacattataaactttatttaaatagccaagtggaatagaatcgattgttttctttatagattgttctttatttaatatgggtgcaataattgtaactgtctttgatctattcaatttgattagaactaagtttatatcgatctttaatttaagctatattattttattatagtattggaatctaatggtctttatacacaattgcatttgtgtttgaataataggttgttatttgtttaagcgacatgttaaagttattaaaacgaatagtactattttatgtaaaggttatatagtctaatgtcactagaaattataatgattaacaaaatcctactaataggcatgattgccgtactatctgcagctttaattagcggctcaacaatgctaacacaagcaactactaattccgctaatcaaggaataggccaatcacaatcaagtagccaaaacagtcaagtatcatccggcggtaattccgaaggatctggcaataatgtgaatgtacaggagcaaagaaatagtggaagtaatgccgctgcacaaagtaacgataatgacaatgacaatggcagagataatgacaatgacaatggcagagataatgacaatgacaatggcagagataatgataatgacaatgacaatggcagagataatgacaatgacaatggcagagataatgacaatgacaatggcagagataacgataataatggtggcaattcagctaatcaaggaatattccaatcacaatcaaatagacaaaatagtcaagtatcttctggcggtaattccgaaggatctggcaataatctgaatttccaggcacaaagtaatacaggaagtaatgccgcagcacaacaaggtggaagtggtagtggtggcaattcagctaatcaaggaattggccaatcacaatcaagtagccaaaacagtcaagtaacttcaggaggatatacattcagttctggcaataatctgaatttccaggcacaaagtaatacaggaagtaatgcattagcacaatcaatcagataaccatttttttcttttttttattatagttaacacactttaagacctctggtatggccattttaattgcttctatgatttgatatttatgtaataatcctaggcttaacaattttgaaatctccagattcatatttttaacttcacctagccatccatttctctacgctgtaggtctaataattttaaatttagcatcatttatcatcatagctttgcatatttgattagcaattgaaattacattgacaggatcaactatacctatgttcaaaatattttgctttatcttctagagaattaaaagtgtatatcaatctcgatatagtctttatatacttcttatactgagtatccttgcctaagatagacaattcttgattgtcttgtttcattttttctataaaatcccaaatcaaccaatctgctccttgaacctacgacattaactaatctaaaattaagccataaattccataggtatacaaataggaagatgttaatgactcgcatacaagttcaagggaatcataatgtgatatgggaattaatggtccagaatgttctggagtaggaatttcactaggcgcaccttagcgaaagcagcaaaatgaaagagcatctatattggcaatcaggttttctttcgtatcagaatcagaaagattcaccttacagaaactaatacgatcattctctatatgatttgatatattagtataatccgctaatgctaattatcaatcactttgatcctttcaactctagattctatcagcttttcaacattctagctacctataaagcctgaaccaccaattactaatgtcccttcctttattcatttatcactattgaaagattgtctaaatcctaggaattaaatggtttgatctctaaataatgaaatttgaactacgagacttttttcactgaaaaggttataaggacttttaaacaatgtatattttactaaatgtattggatggaattattgataatttgattagtagatttaatagatccaatataattttacatattaactgtatctccattgtaatattatcgataacttccgtctatcacatatttgatttatttaacataacattatattctttttatcaaagaataactcatcaatttataactgatttttcatttatcaatccgcctatagatttaacgttgttattaattgggaatacaataatcatcctatcctggaacatcaaaatagttttaaaatcggcaataggatctgcttttatcattttctcggttataggatatatactttctttggatttattcatagatttcttaatcctcattttttttatcaatgttactattatgtacatatgttcgaagaaaaacattcggttattaacgctggataaaggtttattgacaatttattttagccttacactcatagtcctttcctctttagctttattaatcaatttctcgattttacttgattttgaaaaagaattttccacattaagaaactacttgtatgaaatttttttaatgttcacaagtttttcacctttttttgttcttgttttactatttgcagtaccgttcagatggatagcagatttctcttcaaaattaataaacctaaaagataggcagtctatggaaaactcttgtcaagatcgcacaaatttaagagtttcatatagcatccctattttgacattaatattatttttttcaatattgattgcacttttgccacatctaccgtttcttaacttggaaaataaaagcatttcggtagatacagggaactatggttatacagtaaaagttttgactacgaataaagatctataccattcattcttagaatcatttcaaatacaatttgggacccatccaaatgcggcttctggggatagacctctgacattatttatcatggtagttttatccattctagttccagtagattttgatactctagttgatacgatcgttcctatcatactatcacccttattggtattatcagtttattatttggtcagggaattcacaaataaccagatagtttctctaattgcagcttttttgacaacgatatcaccccaaatattagttggaatttatggtggtttacttgcgaactggtttgcattgacattattctatttctcagtttacggaatattgaagtatctgaaatcatctgaaaataaataccttataattttgataattttgataatactgctaaggtttacacatgtttatagttggataatgatgaccccaatattgattgttttctcaattatctacataataaaagacaatacaattgatttaaagttcagaattagaaaggctataattttttcactagtactatttactccatatttgctaggaaatattttactaccgttattggttgaagtgaatcaacccaataatttgaccgatcttaataacatttttgacagtttaacttttaagaatttatctactagtttggaaagcttaacatattcagtcatgttacaaaacggtggaataacagcaaatggtgttattcttgcgctttgcataggctggatagcttatttttataaatttaatactttaaccctatttatttcagtgattttaattttatcgattgtacctgtttttttgggcaataacatttttcaaagtcgaattttatataacataccgtttcaaatacctgcggctgtaaccttgtattatatttttagagtcaaatcagcagggaagatagcatttatatcaatagtattatgtttagttacaatcacattaagaactgtgtcaaatttgatttttacatataattagtaagttacaaaatgtaggtgtaatagcattatacttgtataaaataaaaaaaagagatttactttgaatataactttagctcaacacagtattgtattaatgattaattaccagaaaatatgatctaaaaaggaaaaatgtgattctatacaaatatagaaattatttaataggatttgaataataaaaggattttagctctttacttcagtacagatctaataacaattattagtatactaccctaaaatttgggtaatcccaaattaatcgtacagaccaaattaacatattaccctatttaataataattttggttttaatttgactacaaacacaaaatgacctataggcgttacaattatagcaattctaataataataggtgggataaccctcattggacttggcgcactgttatcagtttctttaacagaaatgggacaaactagcgctaattctcctgaggcctctgagcttgcatccctaggagcgattccaatagctataggcatggtaatgttgattcttgggattgcatatttaatagtgtcatatggcctgttaaaaggaaagggttgggcatgggcaataacaatcatagtaaccataattggtctcattattcaaattatttcagctataatagctggatccattacttcttcagccttatatggactagccagccacatagtaggtatgatcataagtggagctataatttattacatgtttagaccacatgtgaaagcattttataaacattaatcctccatttttttgaaaacattcagtccattccattcttgaaatcgtcggtgacaggtagagccagaaccgtattctccaggtaacattttccactgacatcctgttctaagtacgtagaggattccatcaagtacttttctgtatggtgtgattggtctataccatttcacatatgttcttaaaccatccttagcaaatagtttctcatgttaagaccaaattttttagttctgaaatagcaagatatcttttgtttaaaatcctcaaacgatggatagtatttcagtaaaagcaggtcgtgtttggctatattccagacctcttctaacatcatgaactcaggtgatgctgttggtagatatactgggatgagtgtgtccttgttttgttcgaggtaatcttttaccttctttgacctgtaatgtggtgacgctttatccataaacagataacatcgtggaaatttatgatgaattgtctttaggaaatcaaggaaggtatcgctgttgaatttatcatactgtctgaagagctgttttccttctatgtctatggcaccaaacaaacatgaatgcttgtgtgaacctgttattctgacaacaggtcttttgccctcttcaatccagacccttctaacaagagaatcatagaatagaaaagattcatctaaagatactagcgtaaactctttctttttgtatctgatacccacaagtatccgagtggtctttttttgaattcctctttttcctcttttgaagcggtgtttacatgtaccttccttggcaccttctgtttaaaaccccaccttttaacaatgcaataaatgtaattatggtgatatcttatcccactttcatgtattattaactcttcaacctgttttgtgctccagtcagtgttactctcttttagggttttccttatcctgtattctacctgtttagatatttgagaatgtctaccgcctttcggtctgtctttcaacccttctagaccttcttctctgtatctttttaaccactgggacgcccagcccttgcttttgtgaagtgttctggctacttgagatgcaatcctatcgtagtatacaacattaagaataagcaacattctttccttcacctttacatccttttcagttctacaaaccctctcaaacgatgtcttcttgtcgacaatagtcaattgatgtgcaaaatggggatatgatcatctcagctataaacatttggagaaagtatggagggactctgaatgagggttcaggtaattatcttaattggtatacctacagtcttggacggcttttctttaggcagcacctttttaatttcatcccataatttatctggaatccttatgatgggaggaagatgatggtctttatcatatcttacttccacttccttctggatacaggtcacagtttagcaagagagataaggatctataatcctatcgaattttgggataggctctaaaataaaatgttttaatcatgaaaattctcaaacgccgtattaaatcagatgatttcattttattatctcactttagccttttacgtataattgtaataaagttaatcaatggaacagatatacctctaggtaacaatcttaaagagaataaaatatcaaatttagatcataagaagcattattctgtaacgcctttatacaatatgttactttataatagttaaaaataataaaacatttttgagaaaattaagattaggtcatactaatttgcttgagttaactttatttctcctaatctaaattaagattcacaaatgtattttatcaatacgcgcttttgtaaactatcatagattaatttggagaacctatgggatacaatatgggggaaacgatacctgttggagaaggtcctattgcactcgaattcaatccaagtaatgacaacttctatgtagccaatgaaagttcaggcaatgtatcagttatagaaagctaatgagcataagttcactcttgataataatcttggaaggaatcatctagcctcgattatgacgacaccatacatttggggaatattggaactttagcgaatgctcaataaattataaatgctacaaatagttggggaagataaggtatccatttaacgtatatgctatattttacaatgtattaagtcgattagaaaactcctcatttcatcactatcgataatgggattcaataaagctttatatcagttgaagtctttatttcgtaatttatatctagtttacctagtattttccaaaattacgaattgttctgcaaattatttatctagattgtgtatttaatattttctccataacgtagtaaattaataaggcactaaaaaaatggttcccttacaagtatgtaaaagtgttaattcctcgattatacttttcaaccaaagaatccagacgtatcagataagggattcctataagaccatctttgttacaacctttaatctataaaaaggaacccatttgatctttgttttaattttaaaatatggaaacagaaacaagttgtcaatctgatgataaaatatcgagatctaccgctgaaatatttttctttactgagaattttagacgaataattcaaaggtctggatttggggatgccattatataagtgtgcataaatacgaaaaagatttatcaaaccttacaaatggtcaacagctaatacttgacggcttcggaatcatgaataatcgcacaaaaaaaatatttaattatttatgcaaatagtgttcaaattaggtcgaacacgaataaatctcaaaccaattaagacaaaattataataactcttcctcactacaagaataaatttccggaatattggtacccataccgatatataatagcaccaaataataattttgggatacaattgactacaaataaagagagacctgcgggcattacattaatagcaattttaataataataggtggaattttccttatcatcggcggaacatccttcttgggacttggcgcacttttatctacggcttcagaagatattattcaaagtaatggcagttctactgacctgacacaacttgcatccctaggagcgattccaatagctataggcgtggtaatgttgattcttgggattgcatatttaatagtgtcatatggcctgctgaagggtaaagcctgggcttggataattacaataatagtaaccataattggtctcattattcaaattatttcagctataatagctggatccattacttcttcagccttatatggactagccagccacatagtaggtatgatcataagtggagctataatttattacatgtttagaccacatgtgaaagcattttataaacattgatcctccatttttttgaaaactgaccagatctttaatttttaattcggctcaaaaaaaactaatcaaatacttattattaaacagaatttcatttcagatatgagaaaattcttagaaccatataaagacagaaataaggaaggtaatccagaaaatggcgccaccagaattcaaaagacttcagatagctcaatgcatttacaaattttttataacggaagctggagacatgataacaattgcaaaataaagacaaataaagaatgcaatattacagtatagatcactaaatttgtaattttttcaaaattttttctgttgagttttccaatatagattaaatatttgatagtaacctttgctaaagaaattttacttttttcccaaatcaagatagtccaaattgaactttcctgaattcaagcaaatatactcttgcacagctttttttgctcctaaacatcttgctctcaataataatggtttattagaactaaccaaaaaaaattaggtattttacaatcgaccaactctaacattttacctcaattaaactagcagaaagagttcactttttcaatatctaaaatattgtcattttaataaatattatttgtatatttaaattaattttatatatttgaagatacatctaatatacaactatatttgaatttattcaactatagttagtagggtatttcaagcccagcggggaggtctctagaactgacttctcgtggatatgttatttcaactatattaagaagccaaaccatactaattaaccacatggctagaatgaaaatagaatcaagatttgtgcccgtctttaaatgaatagaattagtgatcagatagacacttcaactacctcattatataacacaacctcacattgtcgatactattctacagaatgtccgacaacagaattatctttcatatctatgcagcaagggcatttttgtttaacacagacatttgtaacttcatgtttacaaataggacacaggcatttttgaggttcgatttcgcccattttctttttcctatcagtttttaaaatcaagtatacccaaattataaataggaacagtgcaacagcaaagaaaacaaatgagactcgcacatttgccctcagtgccactagcaatatcccaaatagcgcaaagcctatcccactccaaaaaggccagattggataatttttgttcagattgtaatatttgaaatctcactcttatttattcccttttagttaaatgattatggacatcagacagacgtgtaaatgacataattctgcttttgattggtaattcaattaagaattagtaatttaaatatgagaaggtcaattttacttcattgtacaaaaccaactggaagattattccctcaaccttgctcttttttttaataatttctatgattacgagtcagaataacgcagtttttggtcaggacgaccaattaaataatagtaataattctaaaacaatccctaccgacatttctggaattacatgtgataaggttgagcatttagtttatcacaaccatacaaaattaattctaaaatttcaaaatgaaactcacaatatccctgctggaataggcatcatcccaaatgattgcatattttggttgcatacccatgatgattcaggcataattcatgttgaatcgccaattaaaactgcattctcacttgatcagtttttgaaagtatgggatatctttgacaactcttctttcattgaaaatatttcaaaaaatgatatcgcagcaaatgtttcgatgatatcagaaaacggttcccaaattaagtcagataattacaagaatataattttggaaaataatgccatcattgccgtagactttactaacaaatcaaaagattgattctcaataatgggaattgatccctactttagtttaattataaagataattttcttaatagtctttgatatattttatgctgtcattctcatcttcatctgtctttttcagcttgatcacaatagttccaccagctttattgaaaattctttgccttctcttacttgagaaaataagtcccaatatgatatcaactggtaataggaatgattttccgaagacctcaatagctatatttatgatatttggtctttcgccgtacaaatttgtagtcttaatgtaaacaactctttttccaatagtttgtccagttaaaaattccagggctacccaataaagaaaaaaaatggagctagcaacaatgtactcatatggttgtttaatacccactccatcatctccgtcgatagaaattccccaaaatggaaaagaatagtcagctgaaaagatgaaaaacaggattcctattattatcgatattataacaaagtcaatgagccaagctacgaacctatcctcccattttgccaaaacgatttccctcgaatatttcttttcagacttgtttgagatggaatccccgctcttgttattactcatatacatatgaagaactaaaagtaaattataaaaagatatatttaaattaatttcgtgagcgtttcagactttttcacatcaccaagcaagaatgaattgaatttaaccttccttgtatccgactgattatatgattgtataacaatatctccttacgagttcaaataagactgactagtaggtaatcatgatcgaaccgaagtgttcaaaaaaacaaagataaaattctaaaaagattcaatttgtcgacatcgactaactaacaagatttcaatcgccatgaaactttatttattgagctaaaccaataaattaaaaataattaagtaatgcaacgattttgacctacaagttatgtgattcaggcatatcagaaataaagactctaccatgtatatttgcatcactttttaatgcctcgacaattaagcttgcttttgaatcaggtactattgtttcaattcgtgtacgacgagcaaattcaggtgtatatttttctccagttttataaccttgtacaatcctctcggtagcctctctttcaagatggccctgtcccataacatcaaagtatgtaatagcttctacttcgttgtcaaataggacttttttaaccgcattaaaactattttccttaacataaattatcaaccatttcatgagtatgttttgagtctgatttatataaatataaataatgttaagttaaaggcatctttttcatatttaaagagactagagttaaaatagttaatatagtataagtcatttacactcacaatttgagattctaaatgttagttattactatgattattgtaatgtaattattatagatctctgatcctgctagtaggatttattatgatattttgagctaacaatcgaaacaagccgaataaaatgatgcaaaaaattggaatctatagattccaattttggactattttgaaaatagattggagaactcattaattaaattcccaacgtctccttctaatagattcagtagtttacttgaattagtatcgttcttaaaaaggcttttagcttggttaaaagcactctttaattcatcaggagcttggtttacaagtcctagggaagtatttttagcttggtttacaagtcctagggaagtatttttagcttggttaaaagcactctttaattcatcaggagcttggtttacaagtccgagggaagtatttttagcttggtttaaagcactttttaattcactaggagcttggtttacaagtccgagggaagtatttttagcttggtttaaagcactctttaattcactaggagcttggtttacaagtccgagggaagtatttttagcttggtttaaagcactttttaattcactaggagcttggtttacaagtccgagggaagtatttttagcttggtttaaagcactctttaattcatcaggagcttggtttacaagtccgagggaagtatttttagcttggtttaaagcactttttaattcactaggagcttggtttacaagtccgagggaagtatttttagcttggtttaaagcactttttaattcactaggagcttggtttacaagtccgagggaagtatttttagcttggtttaaagcactttttaattcactaggagcttggtttacaagtcctagggaagtatttttagcttggtttaaagcactttttaattcactaggagcttggtttacaagtcctagggaagtatttttagcttggttaaaagcctcgttgtttatataattggttcccatattttgggcatagactactggcgccaaagccaataagggcactaaaattcccaccaagaataaattattcatcgatattttgacaataaatctctgattcaaatgtaattattattgaatatacaaatcattaaagttattgatacaatcaaaattcttaacctattctgaaatgatcttaacctaggaaaattaaatgttgatatattaagaccacctatataagtatgtggaactagggaataacaatgttattattgattccgaagaagaattctttagaaaatcctatgctgtggagcttcaaaagaaaaagcaacaaataaatgattaccaaagaggatttaatgaattagaagaagaaaggcgacaagtgaaccaacaagcgatcagaaccccaggtagacgaggtgaagttataaagaaagaagaaattgaaaaagagttcacaagaagatacaaagaacgaagtattaattgagaataaatcgtcatttctttcttttattagtttctacaacatgaaaagtggaaaaatactttaagattaagaattgcaaaattagcaatttcgttaaaatcacagcttttaaaatatatataatagtaacttgggcaaccaatagattcttgaagtgaacctttaaagtagttatgcagcgatctagagtaaaggtacaaactgtatacttagaaatcgcgattggcacatgccagagccattttaattacgcaaatataaaataatataggatatatatgataacatgatttcacaagaggtcagtagacaattatacagtcatctaaaagacattcgaagtaaggaattaagagatcttattgagaagccggtgttagtaaaggaagatgtccctgtatctaaaattattgggattatgactaaagaaaaatcccacgaggtatttgttcaattatcagataaatcactattctgcctgaatactagagatattctagttgctagggacattaacaccatgaaatcttctacattagggaagagaattccaagtctcacacaaactgactctgttggtaatgctgcaaggataatgagccttcatagattacgagcgttacctattattgatgaaagcagtcatgaaataatgggacaggtatcgtcaaaaagaatactgcaatacatccttgaaacctttgataagaagaaaataaattttgacaaacgaattatcgcttctgacttaatgactcctgagcttatcacaattgagccaaaggataaagtagcgaccgcaaggaacataatgacaaaagacatgatagatcatctaccaatcgtagaacagatgcatgagggaacaaatttggtgaagggtattgttacctcaagtgacattatgcacacgctgattccatcagaaagaattgcaagggatgcaattgtgtcagaacatgataaacacaggttagaacttgaagtaattggtattgcagacagaaacatagtaacgattagtccaaatgaagctattaattctgtaataaatttattgttaaattccaattcatcctatgcattagtaaaatcgttagatacagtgttaggcataattactttcagagatattatttcactattaggcgaacaggttgagaacgaaattccctcctacataataggcttacccgaggatccatttgagtcagagttagtaaaatcaaaatttattaatataataaaattaatgcataaaatatctcccgggattatagaatctagatgtaagattaagattaaggatataacaggggaacgaaaaagatatgagatatctgcaaacattatataccctcatagaagatacacatatacttctacaaatgaatatgatcttgcaaagatttttgatgaaatgagcgacagctttaagaaccagatttctcgacaaaaatccggagaaaaacataaagaatcagtaagatactcgccaagggagtaaggatcgtattatttatcataggataaatttatctgaagagaacatctatagaggataaaaatgttgtactctaaataatactccttccccttcccccaataaaatttagcaaatttaaatactttgatgatagaagataggattactttcctattcagatatatgaaacgaattgtatttgctaaaccaatcttgatgaaacgatgcaaaataatacccgcgaactatcacgacgtatgaatcgttctgaactagagatcaaaaaaatagtcaaatgtactcactagcaaccaaaagtaatagccgcaaaaaagcaaaatatgtagagaatgattatggaagagtaactactcttcaaatcgcatctaaaaataccgtgatattgtagatatcagttgctgttttggcacggctcccataaggccatctattgcttctccattcttaaaaatgatcaaagtgggaatactttgaatcccgtaaatgtttgctattgtaggattttcatcaatatttagtttaccaaacactgcttttcctcttaattcgatggccaattggtcgattacaggcgataccaatttacaagggccacaccaaggagcccagaaatcgactactaaaagcgaatattttttggtaacttcatcaaaattatagtcagttaacgtaattgggctagtgatattattttcatgattattgtttgttgtaagattattgtcgatttgttctttgtacattttcatttttttctccattattttcgcaagatcctcgtcccaatttttcatattttagtttattttgcgagagtcataataataaaggttcattaattactggaatttgtatttgttcttcttcttcttcttcttgtgttgacttagttattttcattacagatatccttttgaatcaactaattgtagtaaaaaaaatgcaacagataattcatcataacattaacaaattcatcaaagatattggtctgatctcttatcttttgaaatccaaaacagtatgtgaagctatattgtactaaaggaggttaattgttgattctattggaaagtgatcgctatatcctgtaagaattgttcttcctggagataattcttcaaggtctccgtttggcttaattcgttgatattcaaatctcataggactttgtccatatgaaggatgtattttgtttcgattccaggtatcgaaaaattcgtaagaaagattgcgatctaattgaatttttttatttatatgaattttatttagatctattttcagatcttgttcaccattcagcaatccacgagagacaataaattgatcaaataaatcgtatccaccatcatagaaaatagtcccatctggtatgagtgaccacatgcaattaaaaagatatccttgataaaagagataattgtgtttatcagtttgtttattgtagggccatcttttttgtagtgggtgttcgaatatttcatcccatttcattaacttccgtttatcaggtgtagcatgtaaatagctcaaaatacttctatcgtacggattgtcattaaaatcacccataattaaaatattcttattccatttttgattcagaatggagagcgatttttcatcatactttaggtccccaggaaggttctgcaattcattcgggcttattttcaaaatgtcttcaacagcacgtgcacaattttcagcaactgcaatcctaagaggttcagtttcgaatcgccctccagcccgggatggccagtgattaacaattatatttaaatcggcattatttgataaaaccgttaaatttaccaccaaaatatctcttgttggatatcttagctgtgtgctatagcctctaactgtattaagtctaaataatttttttgaatataacaagcatgtatcaattccacgaatgtctgggctattaagatattgtgcaattgaatattctttttccgctcgaagtttatctatcaaattaagggccaatttttcactctcaatttcacacagcccgattatgtctggtccctggttatcatgcagagaatttattacatgagccagattttcaatttttttgttctttactacattattccaacccctgtcgggagtaaattcaatagtagatcctattgatgtgggaagagtatcaaataagttgttaacattccaaaaactcacgtaaaattcattcatattaggcagatcaaattataggagttaatagttttttcatttttatgaattaatcaaccttaaatatagtaatcggttttttagaaaagaaaaaattgaatcgtattgactcctttaaaaacaatcgattttaaacacattactatttttccaatcaaagtagttttaattactaacttaatcattctaaaatataatgttagtaacaagaaagataccggtgcttgaagataaataaagtaatcgctttttgaaagacatttcagaatatattatgacaataaatactttagacctgtctttctaatttgagaggtttctaaatagcctaaaaagtaaaaaccatggactaagatagaggatcgtaatatggtagattttcaaatacatcataagtttttattcctagacaggctctgcatggacgattactcgtgaagcattcgtattctccaaaagaagattttgaacctgagtagaaatatcatgggctttttccaccgaaagactatcatcggggctagagggagtgggagaggaaggtatcaaatcaaaagatctattgtcagatttaattggcaaaggatttattttaatggtcaaagtaatgtgaagttcattttttacataaacaagagaaatttcatcacaatcagaaaccccttctatggagagcgccattttctttattcgttccaagaaagtctgatcagccaactcctcacgtcccacagatgattctatatccaaatctgtttcaatatgggtggtaatccgttttatattttgaacttcttcttttattttcttttcaaaatcatcaacaaccccgtgagctattttgaaacttaatttatcatccatctgaacatccagatatagatgcaaaagctgtaaagaattttcactaatttcgttgttctttgatccattacttggttcattaactacaatatttgaaagataaattgaatgaacattttttatcgagggaaaatcctcggaaataagtcttattttatcttttatagtttctgtcaggtaatcttctaccgcatctacatgtacaacaacgtcagaatttggtatgatttcattcttaattttgtactctacattagtagctattctatgtgccttatcgtgggtgaatattcttggaacttcaatgtgtaaatctacaaaagtatcttttcccactttccttaccctgatgctatgagccttttttattccttcaaaacctgttatagattcatgtatttgtccctgaatacctttcggggccttatccaatagaacatctagtgttcgcctgccaagtcctaatgaagtatatacgataagaccagcaaccgtgattgcagcatatgcatcagcattaggaataccaagaaaatatacaattgccagaccaacaagtacaacaaaagaagtaagcatatcaactcggaagtgtaatgcatctgcttctatagcctgactaccatatttatcagcaaccttgtatagagccctagatcgaccataatctactactatcgatgcaatcaaaacaccaaatgaataaacagtaatttcaggaactacttgtttgaagaagatccgttccaacccttcgtaaaaaatccagccagctacgatgaacagaagcaaaacagcccctaaacttgtaaggctttcaaatttcgcatatccataattatgttcaggatcaggtggtttcctcgatattctaattgcatataatgtcatcaaagcagccagaacatccaaaccagaatgcattccctcagatagcagtccaagactattagtataaattgcaattatgaactttgaaatggtaagtgaagccgaagcaataatagaagttatagcaatccgaattttttcgttatatgctaattgattgagtaactctggatctatggtttcagatgattttttttcaggtacattattaatcttaaaccttttgaatttatcaaagaatgaatcctcactatcttcctcctttctatctaccacaaatacaaatgaataaaatattgaggtatataatggatatgaaaaatttgtcttacttgcaggttacaaatgcgttttcgtggactttagacttgaagaaaatgtacatatgatgattgatgaaaatattgataagaagaggaccgcgatatatggttcaattctcaacatgattgttatttcatcaataatgttgctaagacacaactttagaagtaggttgaaatgggcagtctttttttaagaatccaaccatggctaatactagaggttatcagctaccttgttaaccaatgttagtggaagttgtcctcgcattactctttcaatattgatgaatatgatatccgatatagaatcaattgcctcatgggtccatcctgcaatgtgtggtgttaagaggaaattatctagctgtaataattcatcctttgagtctactggctccttccaaaatacatcaaatgcggctcctgcaattttcccttcctttaaagattttaacaatgcatctttgttgaccacttgggctctggccacattaattaaataagcaaattgtttcatcaaattcaattcgttacttcctatcatgttttcagtttctctatttaatggaacatgaatagaagttatgtctgctcgttgaatgacttcagagagtttatctacaccatacaaattatctacaaaatatttcttatccccaccttcagtctttgtgaaaggatgtttcgttacagcaataaccttcattccgaatgctttggcccgtttagctacttctattcctgtaacccccaatcctattattaataatgtctttcctagtaattctgatcccattctatcttgttgtcttctaacgaacgaacctgtatttgcttgagggttgaataggcttatttttatgttcttaaccaaataaagcattaacaagaaggtatgttctgcaacagatattgcattagccataggaacatttgctacgtaaatacccttactagaacaatagtcgatatcgatactgtccactccgataccagattgctgaactaatttaagatttggacatgaatcaatgaaggacttgtctattttatcaaaactgttaatcagtatatcagcattttgaacttgcgatatgagtgattcatcataattaataaattctatacttatgtgggacttttctgcctttcttgctatttgctgtttaaactccaggttttggatcattgctttaattttcaaggtacatcattatctattttccatgtttttatttatctttaatatgtttgggataaatgtaaattcggtcaaaaatacatgaatagaaaagaaaaagacggaatagttatctacaggttataagaactttgaagtgattagtattgccagtagataattccgtgtatttgactgtcttaagtgtaccacaagttagagaacccaaatcaaatgaggtaccacttaactgcaaacctggaaaatgacacaaggtattctttgtatccaaattcccattaaatgtatatgagataccatttgctttcccgctaacaatatgaccacttttttctccagtggatcctttaatagaaatagttccagaccatttaccattcttcttgtcagcattaactttgaaatagccaggggaaataataactcccttttgcccggttgcacaattataaatggattgctgagtattttttgcctgtacgtgagttattgatcctttgttactagatgaagacttcatcatagaagatgaagtgtcagacaccgtattcgtatcagcatcaacttcagcgttatcactaaagtcagttatcgattcagtagctagtacagatccagaaaacatcaaactcggtgccacaaatactcctgcaataagagttaaaactataaacaaaccttttgatattggttttgacattcataatattcaatttattattatacttaagtcatgcgctaattctccccaatgcatgaaaacaattatagatcacattaataatttaaaactttaatgaacaatgaatctcaaattttttcgtaaagtccttgtttctaatatatgttatccggtgtgctttactactctgggttttgtataattgcctatatcatatcccatttctctaaaatactttagggttaacttataaactatttcatcatgatctgcaatttctaaaatgtgcttccatgaaatttcttcattatcatgaatttcgccggacagttttgtgacaagaccacgagcttccactttacaatcctcaaacgtctttccgttcttataagctctatttcttggatcgcaattagcattattcaaatgataatatcttaatcaatttgcaaatatataacattatttcagctttcaagagaagaggatttctttgaaaaatattatgtggcgaagagacaaattaacgaaagatcagtttagtgtgaattaatacactaatcttttagaaaaacaacattttaagttggaatttatgaaattaatggaggagtagataaatttaaagaatacgtactgatattcttatttattgttaatgctttctatttcttataattgtatatcaatgttgaaggaattaacgtaaagtatgacgaatttggaaaaggcaatgagaaaattgttctattcctgcacggtttaggatcttcatccttaacatggcgggatattcccgaagcactatcaaagtattttcataccatagcgttggatctagtcgggtttggagggaccgataaacctcacgaaaattatactttaaattatttctgtaaatttctagataaatttttgagtgaaataggaatagaatgtaccgagaagataagtattatagcacactcattggggggatacatagctttagaatactcaatcagaaacaaaactaaaatcaataaattgatattatttaattcatctggtcttttgggcaagcccacgcctttactttatgactatttgaatgctgtacagaccatggatcctgttttgaggtacaataaacttaaaaatgtgtttgaaaagttggtagcagatagaatcagacttcttccgatcgttgtagacatttttgtttcaataatcaatatgcctggtgcaaagcatgcatttgagtccgcatttgaaaatagtacctcaacaaccttggatttgaacacgattaatgtgattaaagagattccttgtcttattgtttggggagaaaaagacaaacttattccagtaacatttgcagaaaaatttaaggaaatatttgacaacgcaacaatacagataattaaggatgctggacattcaccgtttatcgaaaagccagcgatcgtatatcaaatattattagattttcttgttactgaacaatagtattatacattccaaatttagagaattattcaagataatgaagaataaaattgagcgagaatatatactgtaaatttattatgctaaaatgtaatagaagataaaactgttattagaatttgactaaaacatatgttaaatacctcaaatacaaagatatagtacaatatgaacagttctaccagattattgctactatcttttgtgattgtagttctgtttactaccataagtattaatcattcatcgtttgtgaggggtgatgatgatgatgatgatgatgatgataacgatttctctgacaaggatgtaattcaaatctgttgtgcatggggttacgaattagccgatggtctcttaacgtattcgatagaaactgatgatgatgatgatgttctgaaggatgcagtaagaaatgcagttgactcttggaacgagggtttgactggaattacgttgattgaatcagatgacaatgaagatatcaagatttctttcaaaaatgatgggaaaagaatagctgggaaaactgtaaactattttgaccagtttggattcatcagacaatctcatataacagtatcagaagaatcttacgatcgtgattttagttcatcacaaattgagcaaatcacattgcatgagctgggtcacgtacttggtcttgatcacgccaactttagaggaaatcttatgactgaaagagtagatattggaagtccgactatctcatcgtgtgaaatagaagcagtacatatcgccaacgcctggaaggtcaacggcggagacacgatgtatacaccaacagaaaactatttggaatgttagaaacaataaaaaaactattagcttaaaatagtcattacaattttttggtccaaatcaactattcaattcagttggaaacgaaaaaagcggaggtagtttcctttaaaagttatatcagaaggttctcaaagataaatgcagttattgcaaatatgaataaattatcctataaaaactttaaacaaatttgcaaatatatcaaaaaggaacaactttattctctagaatcaatgtatttaataatatcttaaactcaaggtatttgtgaatattcttcaaaaaaaatacaagtgtgaaaaggatggagaaaaatttgataattatgagaaattcattgagcatggtagaaaagtgcatcataaagtagttttaaaatgtaataaatgtggtaaacagtttattagttcaaaggacaggctgcatcacgttcaagcacattgtaaagacaaaaaagattaatacttagtagatttaacagattttattctttaatccaatattttttattgtcaaagatcacattctgacatgaggattattcgataatagattttaaaggtttaacctcataactaaataaaaattaggtatttttatatacatcaggttcaaaattatctaaaaaccaaaaaaagggttaatgactagttatcatcttcatcgtcgttttgatgtctgtcagtctcgtcgttttgatgtctgtcagtctcgtcgttttgatgtctgtcagtctcgtcgttttgatgtctgtcagtctcgtcgttttgatgtctgtcagtctcgtcgttttgatgtctgtcagtctcgtcgttttgatgtctgtcagtctcgtcgttttgatgtctgtcagtctcgtcgttttgatgtctgtcagtctcgtcgttttgatgtctgtcagtcttatgggtctgtttcttgtcatcctcatgggttagatcatctttttcactgtagccaccttgttgagctgcggcgttacttccactgttttgttgggtttgagtatttaaattgttgccagaatcttctatattacttcctgcgactactaagctactttgaccggaggattgggattgtcctatgccttgatctatagagtcgccactgccacctttgccactgccaccttgttgagctgcggcgttacttccactgttttgttgggtttgggtacttgtgttgttacaacttccgacataagcatcggcaccagaaacacacaatgaatcctgattagaggattgggattgttgtatttttccttgattaatatagtagccgccacctttgccactgccaccttgttgagctgcggcgttacttccactgttttgttgggtttgagtacttgtgttgttacaagagttacctatactacctcctgcgacacacattgtattttggttagaggattgggattgtcctatgccttgatctatagagttaccgccacctttgccactgccaccttgttgagctgcggcgttacttccactgttttgttgggtttgagtacttgtgttgttacaagagttacctatactacctcctgcgacacacattgcattttggttagaggattgggattgtcctatgccttgatctatagagttaccgccacctttgccactgccaccttgttgagctgcggcgttacttccactgttttgttgggtttgagtacttgtgttgttacaagagttacctatactacctcctgcgacacacattgcattttggttagaggattgggattgtcctatgccttgatctatagagttaccgccacctttgccactgccaccactaccactgccaccttgttgagctgcggcgttacttccactgttttgttgggtttgagtatttaaattgttgccagaatcttctatattacttcctgcgactactaagctactttgaccggaggattgggattgtcctatgccttgatctatagagttaccgccacctttgccactgccacctttgccactgccaccactaccgcttccaccttgttgagctgcggcgttacttccactgttttgttgggtctggaagtttgcattgagacatgatataaaagtgtcaattccagccaaacaaattccaagctgactgacactctgaatttgtcttatagattgggtaatttcattttgcgcatatacattacttggagcagcaattaaagccggagccaaaattaacataatgaatattggtaatataatcaaatggtatttcattatagtggttttttatttttatttttgttatttaaactttattcaaattaaccacaataatgttcaataacaatcattagtaaaatttttctaaaattatcttacctaacatgaatactaatttgctattgatttctgctgatttggtaatagttattgttagtatgcaaaaattaggtagttaaaaggcctatatcaccgcggcaagattgcattattactggaaataaccatttcaattatcaaaagattaactcaccaggcagtacaaattagtgtatttaaaatattccagccggtatgtaagattatctaaatattcaaaattttgaatatagtgtaaagtcataaaatttatacctaattcatagtaagcacattgaatttagttacaagttacttaagacaactctatcaataaatcatgaaaaaatttaaaagatctctagatcaagtatacagaataatatgaaatacgtcatgaattcaaaattgccttttatatttttgttagtggcagttgcaatggggacatcatttattctaggtaataatcataacccagcgatagctcaaacattttcggtgcccaacactcaaacatattcggtgggtaacattggaaatgttacaagtgaggaaagtgatacttttttccagttagatgatgcagtacaaactacacaggtattgatcaatgaaacgcagtcggcgattagcaataacaatattacagaagcagtgaatttactaaaccaagcatataatgaaacggttcaaatacaaaataatgctaataatttaatatgggactcaccttcatcaaatgaaggtgcctagataatcctaggatcaaaagcaatcttttttttgtctagttaatcccagattttactattattaatttataagcaaaacggtttggcttttttgaattagaattatcatgttttttagttttatacccaagtagagacaacaaacctatatgtattcataatattatcggtaaatagtaaccacttttgaatagtcccacaaaaattcagaaattattttttattaatcacctaactatggatacacaggttttctagatgttaacatataattatccaatggatgcaaggattaataatatgaagcggtagaatgaaaacaaattcttgctttgaattccattgataatgcattgtacggggatatcaaagcttgtcttttctcatccacatatcttgtgtaatagaatataacaagattagtatcataaataagaattttaaagtaggaccagtatctcattcattattacagcaaaataaaattcgccaaattgtccgacaattaggtctaaacgacttgcaagactaaagttatcaagaattatggactcaaataataggttattacaaataaattaattatcgcataactccagcattcgtcttgcttgttgaatcccagtaacaggtatatttttttcttcaatgagtcctatttgaaccaaaactgaagcctgatcccagtatatatgttcatgagcaattttaggtccggcaaatttcataataactacatgaggtatctccacatatttgcctgtaggttctacccccggtaacatatattcaatctctctaccatgagtaaaactaattatgatttcatctactacctgatctttacctaccgtacgtgatataggttttatttttatatcttttggcatttttcctataaacctatttttgtaaaagctatatactgcatcatatccaaatccaccagtcaaagtcggtacatgatgaacgtatggttcatcagtcattgtagtcatagttgcttcaacatcctcttttttgaattcatattctatatgtttatcaaatattttacctagtttttcaggctcttcagccatactagtcagaggattttgtcgcttaaggatttgtctatttgatgcggatatcaagaccaagttaaagattctgttatttgagattagtatattttatgataggtatactcccttcctgaaaacagtaaaaatcctcatgaatttgataaatctgatttcatcggctacctgatctaaaatgctaaaatggaatttatttttagctatctatcctggatcttttgggaaattgaaataattggtttccgggaggataaatttgagaaaaatacgtgtttggagaaaaatttgataatgctaatcaagctttagtattaaatcaatgttaaaacatcctgacttaatgtttacatatgatagatgataaccaataccatgacaatgtttgcgtgtccaaaatgtggagaatcatacattgctacaccccctgactcggatcacaagaagtcaacaaaataccctgacagagatacaattccaacgagtattgaatgtaaaatgtgtggaaatttaaatacgatttattggaaatcagttcaataatttttatttattcatggttcactgatttactttacgggtaacgctatgaatacgttaaatatcatactggacaaacaattggatattatatacatccaaaatttattgaaaataacaattattcgaaattgaattattaaccctttacaattgaaccaatctttggagcaacaattggtcaagtaaatgcgaatgtcgcgcctttgttctcatcattgtttttggtccatatatttcctccatgagctctacgatatttttgcaaatatagagtccaagaccagtccctgagggagaactcccatagagaataccatgtttgtcattctatttattagccagaactgaatcgtttcaaataatgatagttatatagctattgggcttgagataaatcaacctagtaacgttttctttgtggttcttgaagaattcattgactgctacgaaaagtatcaagatttggagcaaaaatatatggatcctttttgcaatcaaacagtatttctagcaataaacttttgcagtcatgcaacggaaatacaataaattactcattggattgacatattattcaaatgtacctcggttatattcatcagtgcttcttcgacatcttcatccaccggaaatcccatttcatcttctaagttatttatagcctcatcccaattttctccaccattttgattaccatcttctttgtcctcttgtaaggcttgagaaaggtttgctagtgcggaatctttgatactgtcggataatccagttgattcttgttgcggtgatgacggtgatgtggttgcgtttacagttgaaatagctggggacccaatcaataaacctaaaaccccaatggcacaaaacataattatagaaaatcttaattcttgcatcgtggttcaatttattctattgatatataaatatagacagtcacaaaattgttacaattggtaaaacaaattagatacttgactaacaaaagaacaaacaattagatagttagttgaatcatatttgatgtagaacataatcagataaatttaatcgttactgaatttttgaattctgttgttttcaaaaccttctattcccccattcccattggaatccacatagaacttatattttaaaaccggtcttcatcgccttcacctctagaacctcaacttgcataataagtaaaatttagatcatgaagaaaaacaggagattgtatatcatatcataaagcaataaaagagggccaaaaattgaaacacaaatagcagtgattgtatttactttcaacaagtaatcgtaaaccttaaattatctaaatattggatacacaaataaataagaacacctgtatttgtgtaaaattcaaacaaggaaattgaaattttaatatttatatgaaatataatatactcactagatccaaagcttttaaataagatagaaaaggatcagttatctttaaaatatgatttagtactctcaaaacatagggaaattttatcaaaaataaaatttaaacaattttccgttttgatcaacaataattacttatcctcatcttgtatagttatagaatctaactagtactccgatcatatcatataatatccagtaataccataccctagccttttcattatgatatttcaaggtgctggatgggggaattatgaaggtatttcttttaaatattaattaatcccctctgtacatactagataattgattaaattattaggcatatcagctgcaatcattttcattttgaatacggtttcaataggagggcatcatcaggttggttgggagatatatgctcaaagtaactcaacggttgagactaagaagcaaccagtagtagcaaacgcaactcaaggacaacaagccactgtcatagtaaccaaaattgttcattgcgattcctctttaggtattccaaatgatgattccgtctgtcaatttgtgcttgaaaatgttgatgcaagtcagttcgatttagtagtaacaggcaataatccaaacatgactagttttcaaggatcggctaatggaacaaatatttctttagatccaggtgattataccatttcagaaacagcatttgataccatggatattgaaaatcagctaggagaaacagcgattgtaactattttaacagactctaatggggattgctcatctcaatttaaccaagtagacgtgtttcaagaagcaaatggtacgatatctgataattatttacaaaactgtgaaattattaatacaatcgacgtgagtcaaggagcctccccagaagcaccgtaagttcggaatgaaaataacaacatatgtaatatctaaacgtgaaggctcgactgcaaaaatttaaaaatagattcaatcctttatcttttttatcttcaaattacaaaaagttttaaaagctaaacatatcattgtattttctatttgacgaaaatttgaacttacctagaaaaatttttttattaaatttataaggatttagatcctaaacccatgtttttagcataaactagttaacctgaaatagacatgaactagagctaaaagacctaccacaaaagcttagaagattcaacattcatgaaaatcttgtacctttgattcaaatagagaaaaattcaacaatcattattaatcatattctatattttttcgcatataccattataagtgtcggtccaatttgattatggtcattttgatccttgccttatccgcagttttaaatccgatgcttaccttagacgcaacatttgtccaagaccattccgtgtacgcatatgatacccattgcttaagggatagttcaagtgtctcattagaccaatatatgaatcacttagtaacagaattgatagattattcatcgtcgtcatccactagtaacgtagatggagcagaagactgttcaaaccagatcagaaatacgaatattgatttagacttttttgttaatgctttttctggcaatgttgaattaaatggttttatagagatatctttttcaaagattttcgacacgcttttccgaccttcatcgattgtaatattattttcaatcgcggttactggattagttttgaattctcttaaaaagttaaagagaagtatgaataaggccagaaaagggttttctcaagggacacgagaaagaattcttagaaagcaaaatcatagatgtgcttactgtagaaaggtcttaaaggtaatagattatgatcacaagaatggcaatagatccgataatagagaaaataactgtcaggcactttgtccgaattgtcatgccataaaaactaggaacaagttgattaaaaattaggcgcgtttgtacatccaatcaccgttatatttgacaatgtttaatgccagtttataccggcaaaatgattattagttcaataatgaaaagataaagtacaacgatgtagtccgtacagattactgggatgtgacatattggttcaaatcccttcaagctattgttatttgtgataatgacgaaactacgccagtgtaaaaagcactacagcaaaattaattagtttctgacgattcaggtctttggataattttgtccaatatttcttttactaaagttgatttctcctttattgagccttctccaacagggtacaagttgtattgctggtttagtaaatcattacagcggtctagatccttatcgtaaacaaatagcacacttctaagaataccgatattcgaatgtttaataggattctccgaggatccgataatgttaccaatattttgtaaataataatctttagttttgtttaatgtcttttcaagtcgttcaaagaaatcaatgagagcaaaattattgttgttatcgtgctcatttttgatttcccgctttaatctttctctatagtattcgaatgagcaatgaattatgtcagtatacctcaaataattgttcttgggggtatcaaaaaccacaattcttccatatgtaaataaatcatataatgcttttcttgacatgaacatctatttaataccaaaattttgaaaccgaaatcatcaatttgtaccagaaccaaaaatatttctattttatgttggggaagaatgaagctaaatattatattgcattatgttctctggtttcaatgtttctaggattattttacataaacgaccttattttgcattgtatactgagctatcattatgggttgatttttggattggagcaaaaagagagaaagtcaaaggggaaggtaacatggatcgggactttgaattgtgaggaggttcaatgatatttacatatttttctgcactagttggtcccaagtccacatcgaggaccacttcccagatcgtacctagaatagcatttctagtgattagaataaaaataaaggcgagttatttgactataataattcagacaggcctgaaataagaaagtattagatttgaggacagcagcaagtttatgtttttccgcagcaatagaaatggtaatacgttttaacttttactttgtagctataaattcaatagctattgcagtaatagtaccttaaattccaaaaataggaaaaagacctaagaagacttgtgaataataaagagacagatgtcgtgagtaagtacaaaattaaaagaaatcttgatatatttttattgcatccagtcagattttaattgtccagccattaaaaagagtttctctttatttgcagtcaccttcttttttatagattttgctggtacgcctgcaacaatgtcttcatctacaatatcataaataacagaactgcctgaacccacaataacttgttcgcctatttttatcttattttttatagtactatttagccctaaccaacaattattgccaatgatagtactaccacctactatagttccagctgttaactcggtattttttccaatattgacattatgagctatatggcataaagcatcaattttggttccttgtcctataatcgtgtcagagagagatcctcgtgcgatagagcaatttgcaaatacttctacatcgttttctatcaccactttaccataatgagggaatttttctagatctaaagtatcacatgctctttcaaatgcaaatccatcagaaccaatggttgtatttggttggatagaacaattatctcctactttacaattttgcaaatttgcttttgattctattatagtattattaccaatagaacaattatcaccgataactacgtagtcaccaatataacaatcccttcctatctttgctgaatcggctataacagaacttttggaaataccaaccttaggcaaagcatgggtaatacgctttgcaagtcttgtaaattcaagtctaggattatcaacaaatatcaatagttgtccgtccttgtgatttggatataccagcccctccatactttttttacaaagtatcacaccagcgtttgattgtgaaatagagagcatgcctctgtattcctcagatgaacaaaatgaaacatcatctcctgttccagtatgcaatgatgacacatttcttattgattttgatggagatttttgtccttgaattgtataatctgaatcggttatatgctgtaatagtgattcaacggtccattgaaccataccgagtttatttttctttttaatataattgttttctataatatcgtattagagaaatgatagtataaattcagaaatgataattttactgatggctaaattgcacaaaagtctgtgttaattaaatccatcaaacaatcagtgggattaaggaaagttaagcaatcaattcaacggccgaccactattatcttgctaatgcaaaattagaattcagaaatttaataggattttgagatattaatagacaattctctaaaaatttcaacaaaaagtttaatgggcgactatatttctagcacaacatgtatttgtaatatattcaaatatacatcttttaatctaataatttaatcgtaacgggtcctccgctgagagatttttgttccaaacggataattgatcgctttccacgatacataacataggtttcaaactccttttctccatattcaaatttgacctttttattcaaccactctttaggtaccacggcagtgagtcccagccccgggacttgtctaaaatgggtcttgcaggtcatattatcttgaaacacattatatgataaggttaaaagataaaaaacttattcaacgaatgttattatattatatgttttaagttttgtgtgtaaaataccaggttaaactttgattggaaacattttccatttttcatcaaaaataataaaacgccaagagcttttcgtgctttatcatgtaaatactaagatcattgatagttgtgaattagaaaatcagaacagaagagtggaagtttgtttctactagacctatccaagtccaagtccaagtccaaaatcgtacattcttactctaatcgagttggatagtacttactataccacgaataaaagcaacattaataattctgggctctaatggttattcaatccaaaaaatggttcattaatctttcgtatatgaaatcaatggtaataaagaccattttataccaatatttatataaggcgatggataactatgaataatgtcaaaacaagataaaaaagaaacatctacctctacaaccagttcaactacaaaagataatatagatcaagcagttcaaatcaatactgaaattttcaatcgagctgtagaagaaaacacacaatctctaaatcaggtatttgaagagtccaaaaaaaatattgaaagaaacattaccgaagcaaaaaatcagatccctttgtacacaaaatcaataaatgaggttcaagagcaagcagttcaagctacaagagatatggcagaaaactaccttgactatcaaaaacaaaccattgattccttccaatccattgtaacaccatattttgaaaatgcaaataaccagttatggaacaaccaagatatatttagaagatatccagaaatttattcaaaaatagccaataattgtgcagaaaatacagtagctattacccgagtaatgaacaatattgcattttcaaacgttgaaatagtaaaaacagtaatcaacaacacaaaagaacaatcaaagcaatttgcagaaataggaaagagaaacgcaagagtttacgaatcttttgaaagagataacagaaacagcctttaaataaaatccaacttttgactacaagttgagtcaagagtttttcatttactttttttagctaactaattttctataggataaagataacatttagcaacaagtgtctagcagaataatctgatttatccaatttccagtatttctatgaaactgtattaaaggtctcgttgtatagggtttaaagggtaaatcaacttttctcgtatctcacttgccttgattttaataaaactatagatttagattttgtttgatatttggacaaacccggctttttgttaagtcaagttcagttatgttgtgtcgctattatggatgccattgtatctggtttactggtgatagaataatatagatagacgacaacttagattagatctccaataaaactagtaaatgctagatatcaaaagggaaaagactactcgttcatttattaatttgcaagaaaatgattttaattaagaaagtttggtaacatctcagatattatgcaaaatagtaggataaatgaccatcatcatcgttttcctaatgtacctatttggttgatgttttagcaataattatcaatgatcagtcaccatttttttcacttatttctaaagacatgggtaagccgttgggaggaacatccatctcatttttttcacttcattcataatagggatgagcataaaataaataatcacaaccattgttcttattacataacggttcttaattgcatcttctgtaatagtttcgacttttgtaatcccacacctatctatttcatacattaacattaagatagtaacaccttttttactacaattaatatttataatgattataagttttgttatagtgagtttataaatatcaaaagaggtaaccaaaaaataaattctctgatttaattctttaaaaaataaacccaatcaagatagaaaatgtgcacagccatgatacgttatgcatttaatagaaataataagtccacacaatgattagacatcaaacataatttgtagacagtatcatactacactcctgaagagtggtcgaaaggaaaaatcaatacggtgtatgtgtttagtttagtgttatcatcaaataaacgcttattctcaatccaaggtaatttgtgattttcagtgaatatcaatatgtaaaaatatttggtttgattaagaacctttagtcttttttcatcgactgtcgatttttaatgttgcatggcgatcatcatagtagggcgactaaatcaagaatacttgattgaaaagaatttatattcagatttttgattctagactatagtaataaacagcgtggcctcaggtaaagtatcagaccaacgatagaatcaggataagatatctaaaatataatattttcaatcttaaagtacacaagaattttatagtttttagcttgaaaagtcagatatcaaaagttcatcgcaattttaatgatttaaatgtctacgataactagaacaccaataattattgcagtgcttgctattgcatcattatttgttgctggccaagtatcagtgagcatggatgaattaaatgtttacgcaaataagaaatctgacgccccatcacaaggtctatcacagggtgaattatctgaacaatccagtgaagtgttttcagagaatggaaccagtactgcttcaggtaataacgttgatttatcttttaacctaaatgacggtcaaaaagcattaggtcaaaaataaaaatttttttctaaatccatggtatatacggttttcctacaatacgatatctaaatatcatcctaaatgctacaaaatacttctaaatacgattgtgtcaatttatcaatatacacaataataatattttaagataacagttcctacatttaaggaaatgtaatagtaacaaatcagttccagggcttaattcaccgttccactcatttaattaagagatctgtaaatggaatgatcggtttgaaatctaagtcagagacaagaaacatgattctccaattgattatagtaataagaggtagtatgtttctggatctcgtcgcagaacctacataaccgtttgatgaacaactaggaattcacttaaatgataaagccaagtctttagtcaggttataaataaatattttgtaaaattattctaaatttatcggatagaactaaatatgctaaagatcttaaaaaattattatatcttataatttatgtatagaaattaatactaaaatgtttaggtcaaataatacaaaatctaccacagtattaattgtagtagcactagcaacagtaatgataataggtccatcaatatcaaatgttggagacgtctttgcccaaaaatacaaaagctgggatgattgcagagacgatcacagtaaaaactggtgtaagaaatattttaaacatcatgacaatgacgatgataatgacgggaacagagcatcacaaggtattggacaatcacaatcatcagaacaaaacagccaagtagtttccggtggagacaccacaaattcaggaaataactttagcttccaaaaccaattcaacaaaggtaataacgcattagctcaaagcggcggtgatgatgacgacgatgatggcaatagagcatcacaaggtattggacaatcacaatcatcagaacaaaacagccaagtagtttccgggggagacaccacaaattcaggaaataactttagcttccaaaaccaagaaaattctggaaataacgctttaggtcaacaataaaatttttttttgatagatttaagcagatcgaagaaggtcaaacacttcaatctaacatagcttttaggactttatccctatcaatcatgttaaaatacagtagttgtcattagagtatagttgaagatatcagaattatgtgaaatgattgaagaatcatttcgttcgggaaaatatcctttaacacaagaaactgaaaaacgaatgtcaaagctagtcaaagtgataaatagatcatcttcagaagacatgaaaggagataatataatcattgaaaccaggatcagtgatttttttgttatgaataattatgtagcagagatcacacatttaccaggaatgatagaaatggatacgctagattcttttaagatgcttagtagacgcattgacagatctaataacgacgtaaataacatcaccattaaaaaacttaagtaataactttactacatataccagccaaaatttttatttctatatatgagagaatctttggattagaccaaagttaccatgttaattacaatacacgaaattccaatgagctattaatgtatttataacctgattttcagactgtcagatatcaaaaaatgttaatgagtattcatggcataaaccataaaaaattacgaattttgactacaattactatactcagatttaagaaaaagtagtaaaaaaattttctaattaattatagttttataatttctggttggagtcgcaagtaattcttcgatttcactattcatctttaagaaaatcagtcccttttgggttgttttatattccgatccttctatatattcaattaaatcattttctataagaacagagagatattctttaagttgtgcgtagctcagaaaagctttgtacattattttagttttagtagcgccaccattggctgcttcaagaatcatagctacaatttcagtgcggcttctgtatttcatattgatatatataacatcactagtatataaccgtctacaaattagagccagtatcgcttacaactttacgaacctctatgccatttgccaaaaaaaatgcggcaataaacagaaggtggtttaaacaattcaactcgtcttaatatttagaagctaagaaattgatgacaaattgggaaatttgagacataatttcatataataaaagatctaatatttctataaatatcgcggttatattttatcataattacataaaatgactttgtcaaccagctattcctttaaaaatcagtcagttaggacagtctactattcaaatactttaagatatacaaaatatagcataagatctaaaagtggagtgaaaggatagttgagatactcaaacgaatatgaaaaaaatggtgatgaggaggattgtataataagacctcaagtcaaaatagtcaactgccccatcaaaacaagcctcggagtcttaggcaagaagtggaccatgctaataataagagacattggttttctaaagatcaggagatttaatagaatattagaatcaattccagggcttacaccaagagtattgtccatgcgcttaaaagagttggaaagggaaggtatcataaaatgcaaggaagtgagaaaagaccaagtaatgatattatggagtttgaccgaaaagggagaagacatcttacccattctacttttgttaacggcttttgggtcgaaatggtatcctgaatttgtttttgaggacaaaaagccaaggagattagacgaagtcttttttcaacctgaaacaagacagaggatacttgaatataacaaaaggttcagactaaggtaatactgaaagaaactaacaaaaaactagaatcaacttaatcttgttataaaataattaagataaactaatatagtaacttaataccgtcatgatattctaaaaaaaaactagtaacaagtatccaaactatgatataattaatttcagttatactttataattataatgagtaacataacaaaaaactataaagtaggaatttttgcaatgtttattgcagcagccttaattggttcagttgtagtacttggtgataacatggcctttgcaacaggtaaacataacgaagcagagcagggaatcgaacaaggacaatcaaacgaacagaatgcacaatgtgtatctggtgaaatcaccttcgcatcatgtaacaatgtaggaatacaattgcaagaacaattgggcgatttggcattaggccaacaataatcttttttttaatattatcaattttgaatttccataattaacaattgattttagatataccgcaataacaattgcattatttcaatatttacttaaattatagtaaatactgagtaaaagcaaaaatttataaaaattacttaaataattttcgtagtcttcgatatttatctatgaacggttaaattataaaattgttttcaataatcccaccgttttttttaaaaatcaatcggatcttgcttctggaccttgacaattaagtagcactcaaaaataacgtttgattcgagaacactaagaggtaaccatgaataaagcaatcacaataaatcttagaaagcagtaagcccactataaagaaatgcatcatacagactacaatgattcacgtctttgacggcctaagtgcacttcaagactttatacaataaagtttgatatagaaaaagattattgttggcctaatgccaaattgcctatattgtcattaaagaataagtccaccttattccctgatccaatggattcgccaacccatacgacctgactgttttctactgatgactgttcttgtgatgccatgctctgcttttttatttgaaatgccatttcagtctttatctttgtgatcatgatcaaggttgtgactagaatgagggaaaaccacttcaatatcagaagtcatgacagtcggagtaacggctagaatcaaatacatcactgcaattgttaccattatttacttattcctttttctttgataacatttaattcattataatgtgaagagataaattagactagaattctttaagttatgaatataatatttatttgcaccatgatctagataacaagattaagagaaaagtaattgagaaaatagtaacagaattttttatcccatatatccatcacaataaatattatttacaaaacttatgtatcttcattagacacctgagggtctctaaaaatcaaagactaacctacaatttgaaagggttttcatatttttaaaaaatggatcatgatattcttaatacactaaatagagcatgaaataaaatatcatatactccaagtagtaactgatatttgatgctcagtttactttgaattactttaagcatctaaagccagagaacgtcaagtctaaacttggacttcaatgtttaaaagattatgttaaataaaaaataacatccaatgactatatttcttgatacttagaccatattctatggacattatctactaaatttcttatggaggatcttttaagttgcctcgtattccatgttttgtcctaatagttttccagagtatgcaaagtcgttcctcatgattgaatcaacataattagaaaatatggaatcatcgatacatgacccatgcattggataaaccatctttggacttaatttttctagtcttttgctggttattcttacaggcttttcgctcgcaaagattcctaccgcccgatatagagcaatcatagaatcggacagatcctctgagatcacaggtttgttgaatcctggttggataaataaatccgaagtaaaaagtgactttgaattctcttcaaatatcatcatactgtcccaatgatgtacatgaggagtcataataaacttcagtgttgcttttcctatgttcaatttttcattatcccagaatgaaatgtgatctaaaggaacgttattccagccagtcaagtttaatttggaactgagatcactacaaaccaattttgcccctgggctgtttaggaactccataccgccccattcatcactctcaaagtgcagaaaagatacgtaagttaatttttccaatccgattacttccttaactttggcctcaatcttctcatacatgcctaccggaccagtgtgtattaagataggtttttcatcatcaatcaaaaattgattaaaagtaattccataggcatcgtcaaatccacagatcctgtatattccatcaccaatctcagaaatggagacttcaattttgcttggattaataatcttacttacttcaggcatatttgctagtatcaaatcaaagaaataaatattatcaaatttttattttcccaactagatcatcttcaacctcctatttggaaatatagagtcctcatgcaatctaaaaaaatgctaatatgtatatcatctaattttttaatattcctgggattgtcctctggttcagatcccaatccatttggatgacagaccatatgacaatgctctcaataaaaagttggatcagaaaaaaatctttgtcggtaattgttgattgaggaaatcatagaactaaacttagaaagatcatgataaagttctctctaatgataatatgtcattttggaatcatgggaatcatgggattttgatatcattttaaggcttccaaaatctgctatcctcctggaaaaagttcacgctttataatattccattcaactgaaaatcgaccaggtcctggtaacatttaagaaatagaaatagccataaataatatcggtatggataactaacctaattcatagccctctggaagaattaccacatcagaggtattaacgattataaaggcagaaatcatttctattgcaaataaaagtccggttattctagtcaatagtccaagtattagaaataagccgcctacaacctcgagaagaccaattaatagggccaactctgcaggtaacccaattaagttgaaataaccctatgtttgggatagattgataagttttgaccatccgttcgtaataaataaagttccgagtacaattcttaatatttgtggtccaaaagtcatcaaaatacggctgttactcatgctttcacttcctaccataggatttgcaccacgttagcaaaaaaaatcaaacaaatatgacgttttctgagaataggatgatgaatgttcataatcatagaatgccttgaccacggtctgatcaatattttcgctcattatcatgtgaaagaataattataatttctataaaaattggtaagggaacaaaagtatagtagtctatttttttatggcctcatataatccaaacatgtttttctctgtatcaagaaatactattatgaatcccatgtccggaatttctgtttttggcattatcactttgccacctgcttcttcaatcttggaagcataatcatcaacagacggcactgtaatgtaatttgtgacagaatgttctggagcttgacgtttcattagtccgccgccaatacctttattcccattttcgtctttagtgtcaaaaaaccaataatctttagaagggtcttcaggattagccaatttttgtatggtccaatcaaatacccctttgtaaaattttatcgccctttctacatcatctgcagggatttcgaaatgctgcacagtaggcaattcaagcaactccatatttcgaaactattgatttactcattgtcattaatacttaatactctttaaaaagaaaatggtaaaaaaaaacttttgtaatgtgtacttttagacaagaatgacagcaatcatagtttcaaatttacgaaaagctcaagtttgattgttataatttctgataatgttagaaacaacaggaaaaaatgaagttatttattgtccatatatattatgaccaagattttcactggctgttgcgtctccagagttacatgaatcaataatactggcatttggtgaatagcactgggctccttgtatggacctttgtgagtttcctaaggattgatcagtactgctactgccacccagatcaaagcccaaaaaggcgaaagataaattattggttggaagtgaaagtgaaaccaccagcaagagagcaatagaagctaggactaatgtattcttcaaaggctttttatgcattaatattacaataacgttatgctatatcccgattgttctacttaaaactgaatttatattgctattattttctattgtaatttgatagagattttttgtctataagaaactttcatattctggcttaccacaggtttttagacaggtctgtaaggactgtctctactttatctaccatttcgtaaattcaatttcctaaattcagtaagcagaaacttcaggaataaaccaatagatctttctaaaagcagtgagatcgatatcaaccactgcgctgatgactttataggtgttgataagaaaatagatcttaatcatcaagaatccattaaaaaccataataaacctgccaaatccacttcatcagaaaataatgaacaattatatataaagagtagagagaaaatcaataattgtaatataagggccggtggtctagcctggttaagataccgccttgacatggcgggggtcgttggttcgaatccgacccggcccattcggaaattaagtcattctgaatagatttattgagattttcatgactcattggcgtattagttgaaggttttggagaatactttgtaacatttacaggatttttggaattactgtttttcgtagcggcatcatattccacattactaaattcagtagcgggggtcgaaacatcactaactgacgaggaacttttgtatagatttagtgagtttacttcttctccagagacactttccaaacgcttggactgtgaattactatatttagtagcgcgtttgaatgaagggtcagactttccaatgttataatcatgatgcttttggtcattgcggttagatatgggcgccggctctctaacttgatcacaagtattagatgacataatcgaattgccagctaaaagtctggacaatagaggaagttctttttgtaaaacctccaccttctttccgatcaagcattttaactttctttcatatgattgagaaacttgtttttgactctgaagatatagaacctctgcttttgataacatggtaatattataggtttatgggatctagaattaagctttttcgagaagggccactttagaatgagatacatgtacatttttactaatatcaacaactacacatggttaggttttgttggtagtatcttataaagaaatttctctaatagaatatagatggaacatacctctgaagacatcaagcgtctaacccacaggtttgtcaagattttgattgaaagtacaaacagtgaattaaaagtaccagtaaaatttgttgatatctttaatgacgcttgcagaactcaagaaggcattaacgacaaatacgagtcaaacatggaaatgagacagtatgttcgagataacttgatggaaaatggttacatttatgtagactcaaaagacgttgactctatctatccaacacaaaaggccatagacgaatatgccgagtattaaaacataaaccgaactatccattcgtttctatcttaaaaactatgttcacctacggttattacgaagataaagaaaaaactgcaagcaaaactctacgaagctaaaatgttttgtaatactgaggaatattgtacagcagagttacgggtggagatccagagtttagagttgcattagacaaatgagattctgtcgtataatgagctttacaatttttcctcttttaagaaaaccactaattgtattctgtaattgactatatgaatataggaattgtctaattcctcaatacgcatatttacactgcgtaaaggataaatatatacaaacacagtttaaaatcaaatgggtcgaagcattccttcgtttagtcatttgattgaactctagcatatttgatccacagaacattatattctgggtataaaaatttcttgattttttgagaaactatatcaacatttcgtggagagggaacaaagaacaaacagtttaagggtttagtgaaacctgacaatgtataaaagagggcggccctaactttggataaaaaactagaccctatcctgagaagtgatagaagaatgcaggttgcgatgttgcagcagataccactatggttggataggttaatggtaaagcaccgtaggtatgtgaggcgtttatacccgtgttaacagcggccgacgaagaaacaccgaatatagatgatatggcatcagcatctacaaatgatatagtaggagtgtgtgaaaacacagctgttaaccaatatattcctggctgtaatttctgcttcaaccctgtaacctctttcaatcctatggggtttgtaattcccacagttcccaagtcagctagtaaagcatgaggaaccccattaagatctttgtatatacccattcttactttggaagaagacacctgagttgttagatttacacctacagaatctatcgtttgaactctatcgactgtgaaaggcatagcatatagagtgttggctgtaacggctgcagctgttgctaatgctgcttggcttactacaccggccatatagtagcggtttggggccaatgttcctgttctcctgattgaaagctgttctattttgttagtatctataacattccagtttgttccatcggatattatcttgacccaatctccagggtttcttaattcccaagttgatagaccttctatggtttctgagctagctccgtccaaagttacaatattagaagttgtatcagttttcttgaagatgtagattttacctcctttagatgcggcgctcaacaatgttacggagaaggcaccagaagcagcagagcatgggatgaccacatcgttctcaacagttgtatatgttgtagtttgaggatttctcttatagtaaagatttcccatgaccgcatttacaatttggttgttgtgcatgtccaccctgtcatggtaaaagagatactcatcggtgttgtagtttgaaacgccaaacattggacgatttgatagagtgaaaggtgtggattgtaatcttgcagccactttgatagcgggcacatttcccgtgtctatggcgtttttgatatacgcacccaagtggaaggcttcaattgtatgaggcgagttagcagatacagccatagctctccaaattggattgaatgagcctgatgcgttcgtgccgttttcaacggtcaaagcatctgatgattcatttgtactaaaactagcaaccatttcaaatccgccatctgttactcggcttacgttaagagctggttgccaaccctctagagtgtcagtattcccataaagcttcaattggtcataaacagacacagagtttttagttgacaagccagaccattgatcatctatatgagtttttgttccagagtctgaatagttctgaatggtaagaattccgcctatacctttggttgatttcgcattagccgatatcgtcatcgaaggagcggaagcatttttccagatgtcccaaacattacaatgtaagaacatatttctgtcaccgtttacatttacaattcctccctgggtctgtggatagtgatttgttggatcggtggtagtgctttgaatcgagcagtcttcaaaatagttgttgttgcatcctgactgatcagcggtaaacgtgccagtatgctcaaagtatacgtcatatttgcaggcttcagaatagatgtctatgaatctcatctggtttatccatgatctccctgttgtgtgaagatagagaggttttccacaacgccagactctaatattggatatttgactcgcatatacagcacctggaaaatccggatcggttgcatcggcaggagcgatacctatgcagttccaattgttatcttgtgtcccttgttcatcataaacaccacctctcagatacgcattatataagaccgtgttttgagcaggattaaaattccacaccgtaccagtatagcctgccggaacattgatcctagtatttgtatgtatatgcgcgttcatgtggcttgcaacagaccaaccgacaaaggaagagtgtagatcatagattccagattgaacttcaaaggatgggtctccagatgctaagatggcagtaatgagtggatcaaggttagccttagaggttacagcaccagttttgttgttacgggatttgactgctactccatcctggtaaattgtgtatgtgtaagcagttggatatggcattaagttatctgtttgatctaatgttttcttagttaatgtatctgttgatgaagtgagaatataccaccgccagtttctggagtgatgtctgttaatgctagagattcatctttttgaaataagtattccttcgtttagacacctaattgaaatcgagaggttgaactggtctgaatttaagaaagtactatcgactaagaatgacaaagaagcctttaacaccatgtttgaaaacgcaaaattgtatacacaatatctctctaattctaacagaccaatcccaattgagcctattatgatgggtgctttgttccataactataaaacgcttttgaagttgtgtaaagatgaggacaatactactgaggattccataaatcagaaattggttgtattggatagagataaaccgttagccaaagcattgtttgacaaaacttgtgaaaggtggcgcgggttgctatacgcccttcataaagatgatagagaacagttactaaagatgttagttgactgttgtgttagtttagatgatgaggcggccaaagtgctaatcgataaagtttcagaatctaatatctctattcttttcttcttctgccttgtattgcagaatcaaaagctgatagagagaattaagaattctgttaagaacggagagaatatcaaaacgaatggtacattgtttgactatatagattgacgtgttcggagtttgagttagggtggccacattatagaaattagcgactatattggtaattgatgaagaatttactaatgcgccgtcgccaaaacttttgaaatcaatatatgatgtatatgctgccttcttattcttaaggaacttctaaatgaggaacacactataaaagctaaatagaggaataatgtagtagaacaacataatattatgatgtagaatgttgttgggttaatagtgatattagtagttggttgggggttggggggcggcacagttatgattagtaatggttttagtggtaatactgcggtggcccccaccaaacacaatagtggaaaacatattatcagccatctcactttagtatagattacccaatatttccaggaaaacccgctcatataactacggattcatcagattggttagatagtataaagaaagacccattaaatattaaaaatatagatccatcagaaattcttaacagtcatacagatatcaaatcacaacctataatcatatcaatatcaagttcgtttcataatgacatgtataatgtagatgtacaagaggaagctgtaaatgttaagttaaatcatttgaaaaatgtggatataacccaagatatattcactgctatatacgacggtagaatcgggtacacctttgtagttttagatccgacatctcaaacaaaacaatcatttacatttgtaggaacaaaagatcatttatataatattcatatttcaggtatgtcttataatccaaatactacagacaatatgaacaaaatattaaattctataaaattttttgattagattttttttgaatattttttgatacaaaatagaaaaaaatcatttctttagggtttgagccgacacagatccaaagttctagttaataggaattgattgaattgagttcggcggcgctcttcttaatagcaatataacatagtcaaaaagttccagcttgttagatatcaattgtgtcgagccaccaggagttagttttttgatttcatatacgctcgttgcaatttgggcatttgtatttttcttttccgttacttctctccattatctcacttaaactaaataccatagatgaataagtattacaggatggacattcgatttctttgacaaaggattcatagtcatttctgtttgaaaacgctaacttttcataatgatcgaaatttctggctatcttgcgttcttgtgcttcaaggatagatttcaagttaaacaggtaatattttttcatttccggctccagtttcttatatgattcagctagtgcttctttcctaatttcccatagatcatccataactgtgggatcccgggccttttccataagatctctttcattatagagaatgtcagtagtaaacaacgtgttcgttagtctactaacgaaatattcgaaggaattccattcctttagagttctaaagaaatagaagttgaaaagtgcatttgaattttttaattcttttacagtagtcaacaaatcataaattgattctacaagtttggttctttgaatgtcattatccctgtaagcatgataatctattaagaagaacaatagttttccaaaattagttagacgataatattgtacattcacttttttttggtttattgacgttcgatacttttcgacaatctgcaattgtacaagatcatcgatcttaaattgaacaccgtcttttctgttgttaattgcgtccctaattcggttagcttttgttaaattccttttgtctagagatttgtaatagttaatcaaattgctattgttatggagaagccaatcagttaacccataccggttaaattctataacttcactagaatatttcaagatatcttggtatagtaaagcagcctttgtcaaatttccatcctcattcttttcaatcaaaatcgtaattgatgatggttttttcccacaaaatctaccatgcatggtaattataaaaacgctattttcaataatgttttgtttgttcataacttgtggtcgaacctatttttagaaagattcaaagcatcgatagtgaacagagatttttaatagatctgccaaaagaattcgcgaaaaaactgcaattgcgaaaaggagactacgtaagcgtttaccaactagacgaaaagatcataatagagagtgcttcatatgggaccaatgatagatatgaatatactagatttctgaacacgaagaatcctaagaaatttaacaaaccagacaagaaatcaaacgatatctatactgaaaacgatgaaattgattactggactaacgagaccatcatcacatattgcactaatcaattaagagaaattctccagaattcatcgcaaaatcaagaactagttatacttttaaggtttctttcgatttgcaattgtgtagacaagatcgagttttcggaaaagatcatcgaccctattttgaacaagatttgcattcagtttgacttggactatgaagaagtgaagaacaatgtcatggttgagatcgaggaggaattttaattgactcacctaattgaagacattgattactggttttataccataggagtaaatataatcccggttccgtaccagagcaagaaacctattgtaaagtgggaaatgtggcaagatcaacctattccctctgaagtttatgaaagatggaaatcgtcgggatacttcaatgctaattgcgctatcatcatgggtaaagtctggcgaggtcaatactttggaaagtatttagcatgtatagacatcgataactccaaaggaatcaaagaatttctctccaaatctgaaaaagtagattctctagataaacttgctgaaaagaccattgttgaacagcatcttgatgctaaggataagaaagtacatatttacttcatagtggaaacgccactaactaagagatcaggaattggcggcccgaacaacaagaatgaggacataccagcaatagaggtaaagtcagagggaaaacacgggttaatgtgctgtaccccctctgtacatactaacggccatccatctcaaatcattggaactagaatcccactagtcctcattgaaaacaattccaaaattctagaagatcaaatagaccgaatttacaaggtatattctcagaatatcaatcactcaaattctaatttgacaacagaactaaggctaattgcaacaacaagaaggataggatcaaatcctccaaagatatcaaaaggttcaagaagtaataccctaatttcacttgtacgagtatattaaaccagcatcatcggacaatggatcttcaagacattcgatcattcgttgaagaggtaaatcagaaactatgcgaccccacactttctaaagaggaattagatgctatatggaaaacagactttggttacttgctagaggatttggaatcaggaaagatgcgtcccaggctaaatgatgaaaatgagaataccaaaacaagccccaaagttaaacccaagactggctttttaacttacaagtatactctcaaaggacatatttacgaagcagtaatagttgatgagaaatcatttttcctcactatccagaacgatgtactaatattagaatcattcttagaagaggaaactcgtatattaaggccgcccgccttagaagaatatccttcatatactccttataccttcaaagacattgatgaagttaacaaatatattgatctagtcaattctcagaatttttcattaggtcaattagttaaaaagattcgggaccaaatttcaaagtatattgttcatcaccctcaaatcttagactatattacagcattaattcttttttcgtattttcaagacaaattccctaccgtaccatattcaatgtttgtttctgacaatggtagcggcaaatcaacaattgggaatgtcttcgaaagttttggatatagatgtattaacatgactgatcctactactgcaaacatttttagaatatttgggactgtcgaacccggacaatgtactttggtcttagacgaagcagaaaagatagatcaagaaaaagatatgatgagtatactaaagacaggatatgagaatgtaaaaaagtacagaggataaatcctttaggaaaacaagaacactttcacacctttggactaaagacaatgcttgctgaaagatccccaaccccatttcatgcaaaaggagtgctggacaggacttttatcatctccaactataagggacgaccgcaacttgacatcaaggaaacaaagattagtgagaagggaaagatcgaattctccttttacaagaatttgttgctcggttggttataggctcatgcatttttctgatagtatacgagatattgacacaggattagatggaagtgacaaggaactttgcaaaccactattgcagcttttctttaatactagatttctatcgaatgtggaaagagtattagaaaaactactggatgagaagaatacaagaaaggccaactcacttgaaagggagatcttagaagtagtcatagatttgatagaaaaagaacacgctgacggtataattcctattcccaagttatgggatgagatcatcacaaggactaattctacaaaaaaccaatttgatgaatcaaatgttatttctgagtcacatggaacaatttctaagaattcactacttaaaatgattagtgatagatttggcgccaaagaaaaaagatattctagtgtaagatgtctttgttttgactatgaaaaaattgtaaagaattatgaagattatgtcaaagaagaaaaacctaccaatatagtttgcaagcctatcaacaacgatgacgcaaatgacacaaatgacgcaaatatggactccctgttcagatcttttgtccaagccggcccctcattctcaaccatcaagggaaaacaagaagaatcttccagagatgcaggaaagatgaattagataaaaaaaccggccgactagtttcatcaaatcttactatggggttaaaaaatagcgtcattcctgtcattccggtcactgaaactcaatcaaagaacacaactactattaaaaatggagaaaaaatcctagctctaaacaatgctgaaaagatataccgtaaatgggagggtggagatatttggggatgtattaattgtaatgataaaggagatagatggtatatgctaaaacatccttgcaaaaccaacaagaggtaaattcttttgagcttcaatatcatatgaattattatcaattggtgagtggaccgatatatggaagaagaaaaaaaaggactagggggtaaaaattctttcagctattctgaagaaggcaatgatatagatagagctgaaagaaaaaacacccgctactactacccagacttcaaggaaaacatccaattcatcctaagtcattttcaagagcgactattcccaaggaccatatcaactcacttatccggcggccgccaaatactagtccaagatattagccaaatttatcaagaatttgaaaagtcaaaatttatagattgcagaatcaatgcttttccctcgattgaaaaccctgttccaaattttatatttatagacttggacaatattcaccaagatatttccttggataaaatgttgcaaatcactttatcaaatattaagaagagattaggtgtggtccctactgtcttacaaactggtaatggttaccacatttaccaacctattgatagttcacaaagatttgaagatatacaagactttaaggaatttgataatcctgataacaggtttttgagatttgaaaaagattatctatcaagcggatatgctgacacggccaactttccatctctaaagtcgtgtttattgagggtccccggtactttaaactcaaggtgtcttgacaagggattaagtaatggagattcgatgattaaaattcttcaaagatgggatggcagaagaccccctgttggatatcaaattggaactttttactcttatcttatttcggaaagagcaaaagataaaacaagaaaagtggaatacgataacctttttcgttgttcaaaacctaaagaaattccttggattgaaaaactattaaaaacccccttaggagatcataggaagacatgtttatggcatattctggtcccctacttagtaaatgtcaaaagggtccaagaatctgaagtatatcagatattagaaaaatggctagatgattgcaataaagaaaggaaggtaaattttaataccaagtatacaatcaaatcaaatctaaaaaatgttaaagatttcctcccaattagtaaagacaatttaaaaaaagaatatcctgatctttatgaaatgattagtagatgctgagggacctcggccccattaaactttcacggtccattaaacccaaaaaaacacgctaaagagcatggataaaaaaatactatcaggacttgactaaaagtatttttgtttttaatcggaataagatagaatggtattttgtcctaattggggtaatgaaatagcagatattctcaagttttgtccaagctgcggcgcaccggctaacagagattaagcgaatcaagataggggattttaactatcaacaattagaagatcaagatcataaacaagcaagaaaagaacgctatcaagttttgcgaaacagagtagaaagatacaaacctatgtgggataaagatggagtaattcaattcaaaagtgatcatatagcaattctacaaagaaagctgggctttaatcatgtcctcattaatctttgcagtctattacaagtttagggggttcgaaaaagaatgttaaagtctagcactctgggccccaacatataaccataacagaaaccataaaacaaatagacataaacaaatatgaggttaagagcatgagcaacaaaaccaaagcttatgaagtaacacttatcgatcaaggattaggggcgtgctcatgtccagactttgaatttagattaagacagtgtaaacatatagcagaggtattgattaaagtagtgggtagattatagatgagcaaacgatcaccgcccaaatcagaacctgagaaactattcattgaagacctatctaatatctataaggaacataatacaagcgggttgtttactaactcctatcttgtaggcacaagaatatacaaaggtaaagagttaatcaatgagcaacaaatacacctagacaaaacactactcatagaattaagggataagctgatcagtatggagttagatcataaatgactataccaaaacccaacaaatagatctaaccagaaagatctttaaaatattaggtggtgagaagaacgtatataactttgctttgattggaacaagggcgacgggttagagtttcatactggtagtatatcaaaggttcaaaagaaacaaatcaaaaaactgtttgataaagatcgattccatatattgatagagaactcaaagcttagcccattagaaccgtatcatcctgttaatggtttacactattggatgtatgaaaagcccacatcataaaccccttaacattatggaccgtagacattaaggccccccaacttatagacccatcattatatagacctgtaaccttttagaccctaaacattatagacctacctttacatatacccccacattaaacaccccatcattaaacccactcattaaaacatcaagtgattaacaagctcaagggggaacgggggtagtataccctagtaagatacacacaacaatgtaacaccacatagtagtgggggagtgggctgagccccctactctcacccctcagggcccccaacatatcacgactatattaacagaaacaaaacgtatggatataatgacagaatatggacaacgacagaaacctcacagaacttttcattgagatagaagattacggaagtaactgtatttgcattcttagattagataacaaacaatgtctagattcgagtgtgtgttgattatgataatttggtgtagttttggtggaggctttaagtcatgaagtcattagagtagttggaattctatgaatgaatatgagtattatgatgaagagacagtatcttgtgaaaagtgtggttataatgacaaggcccatttatggttggataaaactgagcaggtgtatttgattagttgtgataattgtggtgtaaattagaagaagttgatacagacagatgtccaggccgctgacaacaaacagatttattgttgcgaaagtctcagagatttcttaaatcaagaattgtatattgatgaaaatccaagagtgtttgaggttatgggaaaacttttctactattttgaaagtgttcctaatccaattgttgaacagataaagttttgtcctttctgtggaatcaaattggatgttcttgtgggaatagcgcgatagccggatgataggtttttgatttaaccaaatacaaaaattgtaggaagggttttgggtatggaaaggatagctcacatgtcttgatatttgactctgattttttctctaatgcctcaagtattttttttgttgtatttagattgtaagttagacttttagtatttcgaatcttgatcggtgagtttccagaattgtattatcctctatagttgttcagatttatacaaactgacctactccctatctccactacaatgtatgctaacggtaaatcttatagtattattattgcattggttacatcatagctgtaaaaaacaccccctagcacactgtcacaaatcttttagctcataccagaatgtatgatgggcgcctcaattaacagaatacaattacgatggatcaataaccatactattgagacaatgatcgtgagcgattagtaaagagactcgtcctcaaaagctatgatgaatctatagcaatagaatttgtatatagttgagttttgacagatctcatacttatgcactactcgtatagggaacactttgatctgaacctttgtacgttaggaccgtaatatctttcatcatcaaaatcagataataatcctgagtatatcaagatggcatagatacttgttctagtttgctaaacccaccgaaggaaactacagatccaggggtaattagttccatgaattgtttgtagattggttcagcacttttgtcacctttcatactctcaataaattctttcacatgttcagcatctctataggattgtatttcaagccatacttcttcctctacagtagctgaaattgttttagataaatttacaaactccatcatgttttccctattatcaagagaaaatacttcgaagctagatgcaccatgtttggtgaaaaaatctcgagactgtctgttaacttctaacatcccatcatggtttttcttgggggcccgatagaggaaaatttcaatatgaccgcgtgaacctttttgatttgagaaagtgtttgtattactcatgaatgtgaatacatatcgaaaatataaaaatcataaagggatcaaaagtatacttaaatattcaagataacaaagtcaaaagtatttggattgtagccgtcgccaaaatatttgatatcaacatatgatgtatgtactgcctttttatacctaaaaagttcctcaatttgaggaacacactataaaagctaaatagcaggaatatttaatagaacaacgttacattgatgaagctctatgttttggtaatgatgattgtagttttaggtagttgggtgcaccaagccctagcacaacaagaacaatggaaaacatactacaacccggaaaaacaattcagtattgattatcttccagatgcaaatataacagagaaagataaccgagttggaatcgacacaaattccactttgatttctgttaatattaatcccgaaacaaagagtgctaaagaatcagcagtattggttcaaaatggatttcagaaagatggtgaaggtatttgggaaactactcaccctgtagtcattgatgatgttgtaggatattcattcacactaaataacaccgatccaactaatgagatagtgggtaatgatttgttgtctacattcacatactccccccataacggtaaaatctatcaattcatgataaatgaaaacatgatgaatgcctactataatcccgaacagaaaagtcatataattgactctatcaagttttttgattagcttttctctaaaagctgtggaggcacagacccaaagttccaattgtttgagttaggctgcaattccctttgtttttcatatatttgttttaacttgtacatttttctaggaatgattcaaccctcaatgtagatttatctttttccagtttcagtatcctgtatcccatggcttcataccaaaatcaatatgatccatgaatatttcgatggccctgaaaagttcctgtctatcgtaccaaaggcattcatcgtttgaactaaattgttttttgtttattatagtattggggtcctgaagatcattaagtataaccattggacaaatcaatgaaatagcagaaactagcttctaacaccttgaaacattaagaaccttcaatggttataatggtatttaaaaccatctacaggctttatgcagacagaatggccactcaggggtaatttttcttacagcacttttccatcatgtttattctgtatacttagtatccaatattctgagtctactaatcattggcagccactaaacattcgtccaagatctatagaggtattgaatgttggatcccatggaataatcgttaatgatgaacagaattatagccaatggaaattgacaaaaagtgatagtcaagttaacgttgatatttttagcacccaaaagaatcaccatatcatgaaagatttcaaggatatgactctcgaagaaaaagaggaaatacttgaacggataaagaatctcccagagaataaaaaagaggacggttgtgactgtttcgatctattcagtcaatcatttgatgaaatatcaaagaattggtttgattctttaaaagagtttgatactctttacccagactatctgaaagatgaggataccaatcccctagaaaaatatgaatttaggtggaccgcgaagattagaaaaaaacttttttgaatgctcactgctcacatttgaatagtacggctttatctgacgagactataatgctctatttgttattataaggtactttttttacatctactgaactacaatcgtttttgcctaatgataccaaaccaaatcttttatcattaaatactattttatacagacagtttcgcaaactcgtctatcaaagacaagtttcagacaactcctagaatgggaaagagagatagaacatctttttctaccaccctttctaggtgtcttcaaaagtctattcttatacaaagcagatgaacatatccttggtgaacgtgtttgaaaagggagtccttttgctaacctatctaattagtgtggcagatgacgctagtgacgcaaataacgcaattctagagttcttgttaaatcctttttctagaaaggcggcgacccacccaatactactgctaataatggaacaaagctagaagttcctttttcaaaactataccaggatgaaagcttagacattcaaagtgaacaatcatcagcattatcaaatcttcccaagggaataaaaattagcgtcatttctgtcattagagtcattgtcaattaactagcaaatcatgcagtctagttaacttcacccttatctcctcaaactttgaggggtctggtcgataatagtgtctgacaaaaatggaactagatatccgtccctgcaacagatctatgatctcggattcaaccccttcatttctcaaatatgttgcaaagacttttctgcagtaatacatattcatatccaacccttttctttttaacatgagttttaatgcattataactaacattcacaggacagttttttgacatctcaattaaagatttatctacaatagaaatgaaaaccttcttagttcttcgaatgaattcatttgggaacttataatgttcaagtatccctttctctctgttccaatagttttctaggttactatgcacaagaccaatacaggcggatacctctataggtcttaatccggtaagtgtattaaagatgaacagattggcatggggttccgatatttctgaaattacaccttttatccactttaacatatctgagtaacttgtttcatttacgattttgttaaatatagaaagagaattgtcccccgtggaccacaatagattatatttctttatagtttgcttccaaaggtcgtggcgcccgctaaactttgacaaagtagacagagccttcattatatgcaaccgtttgttaggtgaaaatgttaggagttcattaatagcattctcatcaaacaaatacttacaatatttgattgaatagttaaatcgatcattaacagtggttcttgttcctattctttgtaaatattctttgtagcctttccagaaaccttgatctaacagagtgttgttactagcattacaaaacgttaccaaagagccttgacatggcgggggtcgttggttcgaatccgacccggcccatataaaatttgcatatttttgttgtgtttattgtaattatataattaattaattcataatttaaaatattttgatctattccagtttcttattagtaattagtcccatgtcatttttaccgcatatcctgtcgacgcatcagattcgtatgataatatcaatatttttagttgcataatttgatagaatctgtttcaaataacctatatcgctataaaacccctttcgcccaaactggtaaacggcctcatttattactggatgctataaatatggtcgatcccaagaaagatgaataataagttatgccaggatgtatgtttaaacttgcttaactttcatatattgttggtcaaataaattattatatatcaaggcaatactaaataatttcttgatttaccaggtcatgaagcaaaaagttcctagacaatagtatcagtgttataaggtatgctatatacatatttatagcgaaaattatggattctcttcttaaacatacactaaaacgtcagatgccctatcttatcggaggtacaataactgggactctgatggcatattattatggtttcttattctctattatagtcaatagtattatttggtttgcgatttctacaattgttaacaaatactactggcattacacaggttttaaggatgaaatgcgtctcatttctaaataccttctacatgaaaaagttatgtctatcaaatcaaaccatctaaatgaccccagcaagatgaatacaaagttaaacttgtcaacaaatgataacgccggcagatctgtttctaaagtattagaagaaaataatccagataatactggaagtcctatcaaatagaaaaatcgagaaaaaacaaacttcatcaggttttagaaaaactatattaatttattttttgaagttcgttacaaactaaagaaatatgatatgggttccttttaatcctggagttactatatattattatagtatattattgtcatccgtacacaaactataatattcaatattgaatcagttccccacagattgaaaccagatttgataaaatttagactaatttgggaaatttcatatctcattagttgacttttaaagtgcgagttacaggcaaatatgacttgcattcaacgcggtctattgaatatgctgtctaattctagtatgggaatgtggaggaaaatccctggcgtgaagttaacactaataaaatttactcaataatcctattctctcgtattcttttttcctcttcggccattccctcatccgtaatgctaaattcgttaccatttgatatttctaccaacttggagtcattccataatttaatcaagtctactttcaaatatgcttgatctaatgaagatactcgatcctctaattcttagaggggaactttttcttgtctctctcttttttttagatgcagatgtgctaatataatactcctaacttttcgctctgcctcttcatcggattcaaaactcgatatattattcatactattgaaatactaaagttgtttaaattcttaacatgattgacatcccttgattgaaggcatcgttttcaaaaataattccaaataattttgaatattagataaataatttttcttcatcttaaggtcattcgaacgataatatgaataatcatttacaaagacccattcataaattggaacgttatagcattccgggattaagggatattccctctatgaatagattatcgcgcgtttgttgatttgaatcccagtgctttttggacgatgtgtatatttatctgcaagtaatacttagtcattcagtcaaccaaaaactgtcccgttaataatataaatccgacacaactcattgaataattttttgtattttagcaacaataccttttctgcagattgcaaaccttcgataaattttccaacttttttgataattctactataatccttgtcctcttgtgaaaaagtcttgtctgtggtgtcaagatccctaaacataaaacatttaatcaccgcaatatgtaaagaaattacaattttagcattttatcagtatcttgtagatatagttaaatattttcaaaggaaagcaatatctattgccatcgttatctgcacgttctatcattatagtagatgacgaaatagaacttgcgtctcttttcaaaactttattgacaaatcaaggatataatgtagtctctcactgacccggtattgactttagagtattttaaggaaactgcaggccaacattcattgataataactgatttgagaatgccagttatgtgtggaataaatcttgcacataagataagagagaaggactccaaaataaaaattttcttgatgagggcttttgaaatcaaagatttagaagatcgtcctgattttaaatcagcaagaattgatagactacttcaaaaacctattcatttttctgaattgagagaaataatgaatgatgcttggaaaaattaatacacgtgttaatacccatacttaaacctatgatcataaaatgaacatagtttgacaaaatcttgtctaaaagtgttttatatttttataactacaggatgatgattcaataacctttgtttttgctcttctgataatctattaaaatcttttttatggaacaagcatagtctctttaaatccatatcatatttggatggtagtgacaactcgtaatttacaagttcttctacacgatgtttataatgaaaggcaccggtatctcctatgaacgatacaccagattttccaatcgtcttagcatagtctactaactttttactagaatcgtaatcagattctaaagaatcactagcgaaatatttttttaacgaatcgactattattaatgatttattgtccttttcccacttttctacatctatagaaaaatgcccttccgacagggattttctgacagaatcttcagtttcatagaatggtaccagttgaataacttcgtttctttcctcaatccttttttttacataataagaataaaactccctaagtttctccaagtcctcataaacaatcaatgtatgagttccataatctgattctgaaatagtattagcagcattttctatatccattgatagaattttatctttaacaggaatatagaaacaccataatgttatttacataatatactttaatagtatgttaatatttctaagtcatttctttgtgttaatacatgcgtgtatttcgaatctaaataattgatcgtaattatttaggataagtattattcttcaaaaaatcagtcatgaaggtcaaatttagagcagccttcattgccattgaggtataaccatattagaaatacatcgaaacatcttctaaagtattataagtagaattgaaaaaactgttctaatagtattaatggagatacaatgacaattttatgaagcaaataaagaaattacaagaaaagattgaattaaaatcaatacaatcttcttcaattctgttgattattctgatcgttatttgctttacatctttgatattgtcaataattctatatttatatctgatagagtcctcaaaacaaatagagaatatatcaattgactatgtcaaactaaattcgataagcacgattacatatctaaaagagataattcaaaataaggttcaggtagtctcttcaaatctaaatatactgagcagccttgtcctaacaaaacagcaagacttgttagcaattcctaactttgaagcggctcagtctactaccgatgacctcacagaaggatatggttggatagatgaaaacggaatgggtatatggtcaaccgcattttctggaaacaagactacttttcaacaatatgccaacttgaatgtttcagaacgaccctattttaaggttccaaaagaaacttacaaaccatatgtatcagaggctttcaccactacaaactttaatcaggtcccaaggattgttatagcatatcctattttatctccaaaagctagtgcaataacgacaacgacaaatactacagatgtcaatcaaagtactgctcaaaaacttctcgctacccgggaaaacataagcagtgttactaatattactaatataaaaaatttcacgggctttgaaattccaataatactacgtaaccttccatctgattttctaaaggataattacgagttcaggggaatagttacggcatctatcaactctgctgcacttgatgattatattgataatgctctatatactagaaacaactttaatacgacaggtaccgacaatggtaggatcactgttgcattagacaataaaagcattaactctgaaaccaatcttaattttgacgacactcaatatatagaatactcaaacattatacgatctccatctttcttttttacaccctccttatcctcttcttcggcttatgaaaatttgtcatcaactctaaagccaaatatcctgcttacagacactaacggggtaatactattttctagtgatgaaaggattaaggtaggctcaaacaatacatccccagaaaatttagttctgatagaaaaaggatatgatccaactacggcagattttttgacatctgtccttcagaacatcacgaataataaggaaaaaagttataatggaaatctagaactaattaacaatcaaggaaacaaaattattgtaaatctcgaaccaatattgtttaatggtaaacacatgttttatttgattacaaatactaaatttttacttggtgaaacggcaaataacttgatatctaatcaaatagttttcacgtttctttttatagcgtgtttattatttatggtatttagttttattgctataattctagcaattaataagaaactcaagcatgaagtcaacaataaaacaaatcaactccttcaaaatgtcaaagatctaaaattatcaaatgaaaaattgatacaaagcgaaaacatggaaagagaatttgttaatactgcagcccacgaactaagaactcccactcaggctgttttaggttattcagaactagatgatgaattatttgatgatatttttaagaatagtaatattaaagcagatccagaattggaaagacaaatcaagcaactccatcaacaccatgaaaggatatctaaaaatgcttctagattggataacctagtaaataatttactagatgttgccagacttgagtcaagtagcgatagtagaagtcttcttataacactacacaaagaaaaaatagatctagtcaaagaaataaatgaaatcgtaaaccagcaattagataaaaaaatcaatgataaaaatcttaagataaatttcataaataacacattaggcgaacattgttgggtattcgtagacaggtcaagattaaatcagattctaaataatttgatggacaatgctataaaattttctaaaaatgatggcaacatagacattataataagagaagacagcactggtttaccagaactaaacaatcaacaaagtaataatttaaatggaaatgatgcagcgggtgcatcaaaagattctaaaataaacgaaagaaacgaaatttatgtaggaatctctgataccggtaaaggcatttcttcgactatattacccagactatttggtaaatttgtgacaaattcagattatggaactggacttggactctatatcaccaaaaaattagtagaggctcatggtggaagaatttgggcatataataataacgacggattgggttctaccttcgtatttagtataccgatatttgatgatacgacagaaaataattaagttatgaatcaagaattatttaccccaataattcactaatcagttgtaaccatcttagcggtaagttaacaagatttttcttcgtagaaatataaaaaaaagtcaagatcactttcatcaaaattcacgaaataatttgtgcgatatccaatgaatatgattatttacttatttagattaaggagatttattattcgcatgattatatgacagacaagattatacccattttagggtaacacccgacccggcccatatagattttgtaagtttttgttatatttatcgatattatttgaatgttgtaggttcatagttgtattatttcgattttccagggatcgatgagacttaagtaaattagtatactctttttgtgttacagtatactgtttttctagactaggagaataatgaatattgcaagtcttacagtatagtccaatcttcttaaatcactccttgcaaccgactcttatataggtcgagttaagacatttgtgacagtttaagcacctagtcgattagattaaagattatcaaattaagataaaaggattattgattatcaaaaatgaaaaaaatggagtttagatacagttagcagtgtagtttctctctgagaacttttgtttgctcactaaccaatttgtttagaatgtcacaataattgttaccattctccttgcccttgggggaaaccgtatacgtagcatctacaatacttccccgaggaggtatatgacatgtagcctgtattggtccgctcgctacggcatagcaatcatttcggcctgaagctggattgttaaataagaactgtaccttcccatattgaccaacatcaacaaaaacatacccctctctcagtaccagggaaaggccagcctttacctctcgtcacccaaaagaggttcccatcgtcatctaatttaggtttagcagtccataatccctcttccaggtaccccaaacattagaaaaggggccagcagttgaagttgctttagcactaatgattgtatctgcttcttcaactagcgcaggaaccagaaatatcaccactattacaaatacaactgagataaccgtgaattgggtagtccttttttgtataatttctaaaacatcagtattattcatacaattctacttcgaattgtcaatataacaatgactattaattatacggctagataatcctgcatatcaatccttggctatttcatgttttcaagattaatcaaagagtcagctggttcaatccattatttattacaaaaaagtacgaagtgctggatttgaacccgctctttgctttgaaataaagttcaaatcccgaaaatagcggagagagaacccgcagtccctctcattttaaagaccttttttggttacatttggatttagataaggaagatacagatcggatattgatattcaaaagacggtaagttcttttttatcaaagttgaattcatagttatgattgtctcaaaccttaccgaagacaatcaaaaatccgcgttaagaaatatgtaacttttattctaagaatcatggtctctttatatattacaggtttattgctattgttaatgcttctaattaaatttaagcgagagcctttgatagttttaggtatatttctaggtacattcttaattttatcagcatatttatcgtcgtttgattcatctctgtttcatgatgctttggcccaatctgatgttcaaactgtcaaatatagaaatctcacacttgatcttgataatggagtaacgacaaacgctcagttagcttatcccgcaataggtaaaggaccatttccggctgttctccttgttcctggagcaggaccagctgatatgaactacaccgcaggcgagaacgctaaactattttggcaaataggacaatttttatcagaaagagggtttgtcgttcttaaatatgacaagagggcaataggtgaaaataatacaattattaaccataatttatggggaaatatgacatacaatgatctaaaacaagatgcacagaaagctgtaaatgttctaaagcaacaacccgaagtagatatcacaaagataagcttgatcgggcatagtgagggaggtgaaattgttacaagactagcgacagataattcaacaactaaatttgacaatattgtgcttatggccccaagaattgagactccaaaagatcaggcatactacggattcgttgaatttccacttgaatatgctaagatagtattagataaaaatcataatggatccttttcattgcaggaagcattgcaagaccaattattccaaagcatggtaggtggtaatgctagtttgattcttactccgagtattactgatgatactagtactaaacttttaaaatcaatatctaatcctaataaagacagaaatataaatatcgttactgaattcaaacctcttcttgagaagaaatttgaaaaggcatttgagggatcaaaatgcgaaaatcctatggcaggaccgtgtccaatctatctacgttcaattagtattttagattctactctaagtatcataggtaatgtaccctcatctactggcattctaatactccatggacaaaatgattcgggtagtagagttcaacaagcatttctcctacagcaaaagttatttgaattaaatcaccctgatcatacgcttataacgtacccagacttaggacaccttttctatccgtcaacccggtggacaacagaaagtggacccatacccgaacatgtcctagcagatttatattcatggttggaatctcattctaaataacaaatagaaaacaggattagtcgagaatagtttcttcttgaaccttagattgtattaagaggcaattattcaccttttttgattattgttgttcaaatgtaaattgtaaccaaagtgaaacatgactattgatacatggtgtttttaaacacatcaggatagtcaaggttaacattagctcccagcaatgttccagtcgggttttgcatctctagatttccacggtccttttgcaagacccgatgttctaccaaatctcatctaacaattcaggatttctcgaatatttaatgagtatccattttgcgaatataaaacgtgcacgtgttttgatcaatgccccgattaccaacagtcaaaataactctaatctcttttgcagtatctgaaatgaactgtaggaatccccaacgtcgtttaggtcaaagaaataatattagtcatcaaattgatatacagtcatgaatataattgaaagtgaatcttcgtttttggtagaagcaagaacttgtggatgtaaagaaagaggaaaaagtgtttcatatcattttattgaatctgcacacagtctttgtttagggaaaggcgagctgttgttagctcaaattcaagcttgtgaaagattgctgaaatatataaaggatgaagaagagattacagcactaaaagatgagacagccaaattgaagttagtattagacttgatacgatactaaataacaaacataatatagttaattaaccgttggctaatattgaccttatctataggaaagattggacagtataaattcagataatctatctatgttatatcagatagttaaagtacaattaagctagaactacgaattcatccatagggtgtttatgtagataggcgtgtttaaatgtgcaggagtagaaatcaaaacagatagagcatatgatagtcgctttatttttacacccatatgaagaacagtatgctagtttgctgctcttgttactcatggttcctgccaaaacaaatgtgagatctgcaatttcacttttgataactgatgcttctgtgtcatccttagtatcctttaatagtattccacatgcctggatttgtgccaggtactatttccctgttatcaagacataggctatgagatgattctataaaattataagaaatgcttttcggtttagtattacacccgcagatcttggcttctaccaggatttgaatttcagactcgatcaagttcaaatagttaattctccctttttcttcttcttttaagacttcgaatcaagcataactgtgtcgatgattgttttgcggtcatcaaatacatacatgagtttcagttattcactatatttaagaaggaggaatcattggcaataaatagatacaaaagtagaaaataattacaaagttattattctagcaaaattgtactttaactattgaaaatggctaaaatcatcaagaatgatgaaaaagaccatcatattagggcgagcgaaagtattacgctacgatttgacaaggcgatacttaatgaattacgtgatgaatcggaacagaagatggaaagtgtcaataccctgctaaaccagatagtaaaatcatatattaaatggcacaagccggccaagattgcggggttaatttatgtcaataagttcctttatagagatattgtggaacaacttcctgatgcaacggtaaacacgattgcagataactatgctcgacattacttcatggatactatcgcgatgtttgacggtaattcatctgttttcttttatatagactatttgctaacgtggctcaaaatatcaggcttcaattaccgactggatgatgaaaaaacggatcatgtgactataaagattcagcttgacctgggtctcaagtttagtaaatatatctccaccaagataacgaacatactcaaaactttaaaacaaactgatgtaaaagtggaatgtacagatcatattgtgatagtacaaatttctatatcttaattgttatttattttcgatatcttatttataacccaccgggtattctcaaatcagtaattttctcaactcctccaacaccggccctatcttttttgtaatcgtttcattaaagtcaggtctgtaataatgattgacgaaatagctgaactactaatccttccttgaagcaaatcaataatttctggttttattcctttgtttctcaggtaagtagcaaagactttgcgacagaagtaaatgttcatttcaacattctcccttttcaaaagtcctttttattgttgttatttcatactcatatccatatccatattttttgtaatactattactaccaaaattaggagcaggagttgtcattctattatctgacagatgatttttagacattaggttactattattaaaatcattaatcgatataattccgaatgtggtcgtcaatcctattacaatgaaaatgattcccgctatctttgaaacatagattcctttggaccatactttttctgcaaatattattccagcaaacagccccatccatagaatattcatccacccgattgcaaccatcaatagaaagtatggccagcagcatccaagacaatatagtccatgatatatacccattttaatagcaccatccgtcccacttttccaccgcctcataaaaaagcttaaaggagattcacaatatctaatacatgatctcttcaaaggagtaaattgataagcgccggaaataagcaataaaattccataaacaatatctgtttgttttttttcaattcccataacagtccatacgtgcatgggtattgaacaaaccaatagaagcagtactccgattgctgtccatactataatataacatcctgtaaatattgatattttgatgacatatggcgtgatgaaaaaggtccttctattccatatcgcgttcatcttaatgtaacattttgaagcaaatgatgtttgaacatcattttcttttttgattgtgtttctgccaccattaacattaccattatcgagttcgttgtttttaattaacctaccatagaatagaatcataggagagatggatggtctgctcgcctaccaagacatcagaagaattggttatgaattttactggtttaagcttatctattgaaacattctctacaagtagaactgcaatgtcagaatgaggatcagagcctattatttttgcatcatatatagtaccatcactaaattcaacctgttgcacatgtgtattagtaacgacaccaagactagtcattatgtgaccttttgtatcatatacaaatccagttcctgtagctcctgtattattagtaaaaatatcagtagaatttcctatactagtggcgtttgcattggaattattattatcaggtaattcatctgtaattgagaccacggattcttttaatttagtatataaggatgtaagatcaaaattagggactgatgagttagatgcagttattcgattccctgatagtgttgtcatgttatcggactgaatagtattattgtatgaatttggagaagaaatcaagtcttgttgttgtgccataacggtgtttgttaatgatactaataacaatgaaaatacaatcatcatcgcattaaaaacgaatatatttattcttttcccagtaagcatgttcgacaattaagttgcaattatttaagagttctgaacagaaaaagtatgtcaagataatacttcaaaaatgcttttgaccagtacaagtattactggtcaaactatgacaatatcatgctagacagtcgtaagaatatatctttaactggttctctccaaatactcttttttttgattgatttaaggtcatcttccaaggctagaattaagttttagcaaatgacaattgtctagaaatcgaatcaaactttatgtcatatttttttccaaacggctggcaccacaacaaacgtatctgaaagtagcaaaattttcaatgttaacttaggtataaaccgtgaatacaagaatcgggttcatatttcaacctattatcgatcaagttttgtttgataagacccactattgtgcggtatgggttttaatttccattcagttgttcgttacaaccttagattgaattcaaccttgaaacgcattctctcgtgtgtattcaaccacagaaataattttcaaaattttctgaactgaaaagaaaatcattaaaacatgatatctttgacaccaattaacgatcaaatttcaggttttggtcgtaatctgtaaatgattttgtgagtttattgtatatgtcggaattacattgtaatattgatttgtagggttatgaaaacagtttttctcaatccaaaatatccgatttcgctgatttatccgattagatttgttatttccaaccttgttaatttcgagcttttgtgacttattagatatatattccaaaagagaatttcaattgattatctatgtattaactatttatagctgccaaatcaaaaatgaatcaaaacttgttttgcttctatcagtgaaaagtacatttagttagttaccagttatgaatatagcaattcattttatagcattagataacaatccttggccccagactaaaatcgaactcttttaagtcatttgttataaatgtaatcaaaatttactattgactaaagggtcaagataactgtccaaaaactgaaataaaaaaaagattatttgtagttatttaacttccactacctccttcactaccagagtctccgccgtcttcactaccagagtctccgccgtcttcactaccagagtctccgccgtcttcactaccagagtctccgccgtcttcactaccagagtctccgccgtcttcactaccagagtctccgccgttgtttacaccagtgtcttcgcttccagccactccttcgttaggaacaaatgtagtttcatcgtcagtaacagcttggttagcattgccatacggcatttccccaacaaagttacctggagggttataacgacagactagaaagttcatttgatcagtactagtaaacccacaaccaatctctttggtgttctgccagaccattgctgtgtaatggccagctggattattacctgacggtattggctgaccgttgtaatctgatttttcatcagcccagccctggacatgggtggctatcgatgtacctggacttcccccagccaagttctcgttgcttgctccatgaggtgtctgatcgcattgctgggcattacagacgagccccatcgtggacagctggttagcataatcttgggattgagttgcgagaatgttactccaagtaagaggcggactattcacttcttttctttcatcgttgtgcatgctcaagatggtgttttggtcgctttggctgatctgggcttgagagatctgcaacatcgtagacggcactgtcaaaattactgtcatgattagaattatagtaatttttactgatattttcttattcataattcgtaagtagttttttactagattagcttattaactaatcgattagtataaataacagtattaaataatgaatgcttttttggccatccctttttagaaaccaattccttccataattcccacattatctccttttttatgactatcggaaacagaacatgttcagaatccattttcttaagaacaaaaacgtatttttcagatctatttggtattatgaccaattaaatattgtcctgatttgtgaacgaattgactaagcgataccaatagaaataacgatgttactatagttgtcttttattcatgtggtaagtctaaatgaaattgttttacaacaatgtgcagacctaataagaaactaaaatgggtttagatttttcatctgtattcaagctaagtcgaatcaataagattccttcaaggatgtacaataggaacagtaagattgtacaatctcttatgtttagatgcttagaaatgacattgtaactaaggatgcaaaaaaaattcaatttgaatattacttgctagttaaagacaaaatcactggtaatttgatagggattattgacgcaaaatacgatatctgggatattgatatgaaaaaaaataactgtttcatatcgcatatctagaccaaagataactgtttttacatcaatactgattgcttataacctggctctatagtcctcattgctccattaatttacctagatatagtgtttaaacttctatgtgcgcttttacatctatttgatttgtttgtttgatgaggaatcgttttttaggacaatttacgttctgttgtctttaaggtattataggaataaaacaatgaatttacgagctaattaatgaccatatccttagcaaaggtaaaacagaaacccaaaaaattttgattctaaggaataagtgttatctcataatagtatgttagaatagggattgaaggtatatattacataatggtttacgattaaatttaaaacaaataggaaatcttataaaatagatttagatgaataatgtatgtctaatacaagacttaatcatttattatatttgatgcctttatttatgactgctgttcttctagtcatcccatttcaggttcaagcacaacctacttcacctgaggatacatgctttcctgttgaacccggtgcagggacattaatgtgtacagagggccctgcaagtggtgatccggaggcaaactcaacatctactaaaaagggggccacttctaacacatccgaagatacatgctttcctgttgaacccggtgcagggacattaatgtgtacagagggccctgcaagtggtgatccggaggcaaactcaacatcctaaattttggtccaatcagaatattaggatatttttataggtatttcagattttattttgattgtgacgtttaagctttctgagataccaataaataaattatgataatctaactagaccaatgatataacaccgtatagacccaccactattcaaaggaaggtctatgatacctctgacaaggagtacaggatataaacaaattcccttcctttatcctttaatccagagaaattgcaagggaatgctaagtcctgaataaaataggaataatgaaatccttgaaatgactatacaatctgaaagaataggttataagataaggtatgacgatttgaaatctatatttaacatttgaccaatactgtaagagaattattaaatgagaagaagcagccttagtcattgttcattttcaacattcaaataaatccctcctgacgataattgttacaaatttcatttcaacagctcttttggcgtctaaattattacattatcatttagcttattacaatcaaatcattcgaactaaatgaatactaaaatacttttttattaatctcagctggaataattctttcttactaactctacaaaaaatatttacacctttttacgacttattatttttgaaatttttttaaggtagaacccgaatgttttctaaagataacgaaattatccatagcatctacgaaccattccagaattgggttaaaggtagaatcatatcatgctttctggtgcctgattatatacttcaggatttatcccattccttatgattcagcttcagattccgaaaaattttgaatcggtttatccaaatttcgaggtgcctctactagatctgcgggttgaacatcatttgactttggagatacttctctgcaattgtatttttgttctgtttgaaggtctacattacattccatgcattttaaagcgttatttgaactatcacaacatatctctttatttttatcattgtcatatgtgcaatcaaaaagagctttttcacccgggaatgcagcaaaaatctccatttgaactgaggaacttgacaaaagtatgaccaaaaaaactattatacccaatgtcacaaaaatttttgaattaaaatcattaagtttactcatacaatgacttctaaagcaaaaatataaacatttgtcaattaccatgtctaatgaataggatataaacaggtcgcaagatatttatcgctctctagggacaaaggtcaagattatttagtattgatttgcaaaacaactcgatttatgccataaaagtaaatttggtagaattatcaaaattgttactaacttcatagtcacatttgattttagttatgtatacttaatattgagatgaattagattattagggtaagcattcgaattagaatccagatttcataaatatgttatcagtttgaccttaaccatttgtaaagtaaatccataccactttttagattgttttgactattcgttgcacatcagaaccccgttactaccaggaccttaatcccacagaacagacctgttactaactatttaaaagtatgatttttgtagattaagcacaggattttcactaacaaaaagaaaacagatcttcatattttgatgtattttcagaatgatatatgatattaaaaatatgaaataagtcatattaatatttacaaaaaatagtgcagtattgtaagcaatcctctcaaactaacggtcctatattatagtaaggtgtttgtcccgagacgttgcccggcgggttatagcgacatactagaaagtccatttgaccactactaacgaacccgcagtcaatctctttggtgttcttccataccatagcagtgtaatggccgatacctggaccggatcgttgtcctgcattatatttcatattttcgtcagcccacaattgggcaagttcctctggtgaatagagatccgcgaccccagacgcaatgttctcgtttttagcaccgtggggagtagtatcgcatacaggcttgggtggtactagctcggctcgcgcgggatcgcataagagcccgagcgtcgtcaaaagatgaacacaactctgggagtcagatgcaagactgctgctccacgttaacggcgtaactccaacggcagcacgctcatccttatttatattaagcatggcgtttttgagatccgtatttgactatgcgtacgaaagctgcaccatcgacgataacactgtcaagagcgttgtcataacaagaatcaatgtaattctttagatattttttgatacataactcgtaattgattcatgataatttcttatttatttttcgatcagcaagtattaagaagaaatttgtatagatctgtatgacaagattgtccgatcctgaaaccaaagaaagacttggaagtaacaaaatagataaatgtttgattcaagatgtaatttaacttccgaactggatatctacaaatggaacataaagatatatttaaataaataaaaatgaagctttggttttgaggttcctctctgactcattatgagcatggtaaccattaattctacaatcaacaaaattagattctttatagtactctatcattacctccttagaatcaacaagaatctgacctgaccgttggccttggcagccatgatcaatccaggaaaaataatttcctgaccacagaaatgaggtagaataaaatagatatttccagtgtgtgtcgtaacctcatcagaagacaataatatgggtaactatatcttaaaaaataggtatttggttacaggtatggagaggctcattttcttttcctagtttctttagaatgttcgctacttaacatccgatatctacatctatatcagttcggtaggttttttgtggtttagatgactaatcttattgaataaatatgaaacttggatgtcagataggtgattgtcagggcaacaccatgatatagtcaactaattagtagaaagtctaaaattgggttatacttgtcttaattatggtgtattaggatagtaataacttggtatggatcctatgttaaaaattggatgtccatacccatattagccatagcaattattttcattatactctccacaatacaatccatacatgctttaaccgttaacaatattgatcctacgaaactccaattatctaatgcacagaaatcaatatcgctaaatgagatgaatataagtaaaattattctatatagtatagtaattataattttggttgttaccagactcaaatgggccaaacatggaagaaaagtaacgaagccgaaaattataattgagtctattttctttttagcaataggttctattgttatcttcgattcattttataacgttggtattccaattttatacattgttccttatttggttgtgttttttggtttacagcattattcatattttcattcaaataagttaatttcgttctggacagactcaaagactagtgctatttatgtaaagggcggaacacatatacatcttgcgtatgtgataggaacagcatctcgtattattatatctgttttgtttattggcagtttgtttacgccaagccgacgagggataatctacattgatagttcgacaacagtacttgctactatagtatttgatttgctattaatgatttctcttggcttgctaataggaataaataggagaatacttattcgatataatttaattaacacagggaaagaaaaaatttctgaaaagtagagatatgattgtacaaaaacttagcaatttaggattttcaacccatggattaaacatttcaaaaacaccgataacttcctcctttcttcgttcctgtatataggtggtaataccatattcttccctcatgtaaatattgtcttggtatcaattacaaaggaccgataaagaagttcgagtgtaatgaacaagttctgatattttacgatcctgatggtatggagatagaaatagttgtccataaggatgcagagttaagaaaggatcatatctgggaaaaggtgccaatccctaaagaatatacccctaggggattttttcggctacactttctttagaaggatatgaacgaactgtggacttttaactacaatcaatggtttctcaaaagggaaacataaaggaaatagattatgatttgaaatcgaaaataaagaaaaaaactagatggtccttacagtaccaaacaaaaaaagaaaattggatcctttagattctttgtccactgttgattttcctactccaggtataccagtcaaactaattataaatcggctcgttatgccaaatatacctatttttgaaggttattttgatatcatgtattgacaagtttgatttggaacattacaagaaatttttgaaatgaaactaaacctctacccttaacctttaacaccttttgcatcacaaaggtttttgccttgttactactcgttatgtggatggatggtggattgtattcgatcttgaatcgtgttcccacgggttcgaaccagagtatataaaaaaattagaaatagtattgagttgttgattacaggcaaatatgacttgtattcaacccggtctattgaatatgctgtctaattctagtatgggaatgtggaggaaaatccctggcgtgaagttaacactaataaaatttactcaataatcctattctctcgtattcttttttcctcttcggccattccctcatccgtaatgctaaattcgttaccatttgatatttctaccaacttggagtcattccataatttaatcaagtctactttcaaatatgcttgatctaatgaagatactctatcctctaattcttgtatagggactttttcttgtcgctctcttttttttagatatagatgtgctaatataatactcctaacttttcgctctgcctcttcatcggattcaaaactcgatatattattcatactattgaaatactaaagttgtttaaatccttacatgattgactagaatacatgatcgggtttgttaatttcaatttccagtgcttcttgcatactagatgcgtatatttatctgctagtaatacttaatcattcaatcaaccaaaaactatcccgttaataatatgaatccgacccggcccattgaaaatttgtctttattcttgaattcgtcggatagtccactggatgaaattaagtttggaaaagattctagtgaaatggtcagacatggattttaaagtagactttgagtaaaatagcaatgaattttatcagtgtgaaagtgaatctcgatgtccattgtctttgaactattaattctaaataaataagatgtaattccattttttgaaatatattatgattcaacacaagagaaagcataagattttgtgtaaattatgggcatatgcggtcttcattagtggagtaccatctagaaaacatagatctagtactctctgaaatgtaactagatgtattagtttatcagtgaattagacgtttactaatcagatatttctcgagtaaaattagaactctatttatgtgaaaggaacctctaaattttttctagaaactaaagcatcatttacccaggtattcgattttatattctgatgcaagctattagcaactttaacataaataacaggtaaataaggtgaaaacacttcgattatcaggagtagcaatagaaaacatataaaaaacaaaaagtaatatccttaaaagcttactgctacaacaataaagtatgtttgaatattataaataaaaaagaacaggagataaaagttattgaactccattaacaaggtaaaacagtaagagaaatagctaaaatagtgcacatgtcatttggtactattggttcaatcataaaaaaatttaaccaataagaaaagcactagaacgatataaagaattctactatatctgaagaaactaaagccatgcaacttttccttagtggaaaaacaccaatcgaagtaaagatagaattagatatgactaccgaagaagtggaaagactttataaagactatcggaaattattaggactctataaactctataattattatataaatgaaataaaggaggatcttccatcatttctaaaactgtttaaagaagtaaaggatttgtggataacaaatgaagatataatatcatcattaagatacatacatcagctaccatggttagcaataatttctaaaaaaatgtaaaacgaagttaagaatttaacgagtatgaaagatgcccatatctgtgagataaacgaattaaataacagtaagaagaagtcgcaaatccttttgaatagacttcatgatgatatccaaaaactatcgtcagaaattaatctaaaacaggctcatttgggaatcttagatgaatcatttgatgatctactatatagtgcagatttctcaaatgctaaggatcataaaatagactgtaactacccttttagatgacaagagggatttattaattgctgcaattgttactgtaatccaaggcatgcaagttgatccacacaaaggttcttaattagtaaccttgacactaacttggttggtaatgatgatcatagttttatcacctcaaatactttaggtaatgatttagagatcaaaaaggtagaaaattatcttattacctatgattcaccgatccttgatttggcaaatatactatatgataaaatcttaaaaatagttcaaaatcagatcttttttaaatctagatcattcacagattaagacgacgctaattacttcctaggattcttattacaagccgcccgatatgaacaacatactaaagtctgattcgatgggaatgcgtctactggacctaaataatcataccttattaatgctggtgtggtactatagttgatgaatattattgaaaatgaaataccatatctagtagaggcaagaacatgcggttgtcctgaaaagggaaaaagtgtttcatatcatttcatcgagtcttctcataacctttgtctaaacaaaggtgaattgatgctaggtcagattcaagcctgtgaaagattattgaaatattctaaagatgataatgaagccctagcattaaaggatgaaatgaccaaattgagattggcgttggatttgataagatattaggttgcaagcacttattttgaatttaggatgagtatcgctgttctcgacagatatagtaatattcttaaacttgattaccaaaactaaaatcatactttgatagcacggcaatcaaatagtacatattttcaaatcgacaatatgatttcctctcataatatagggctaaattgagtcaaattctataaaatattcacatactaattatctatgtaaaatgacacatgacgtagaaaaacatatatactaaatttggaataatccaaattcaaatatcatgatactgttaatctactatatttcttaaatttagttgtgaattcccgtttgcgatacaggattcggtaataactttcatatcaatttgggttggacgaggcttttttctcaattactgtgacttgatgtagagtcatctgacctgtatgatttaaactcggtccattccatatcaaggactagattattgttaacttccctggcttttgatatcggaacatcaaatctttgatcataatctccaaatatcgttatctgggtatctgttatccccatcataaagcccacgaagtcttcattcaataaacttacttttttgttaaacagagagctaggaaacctatctatagcagattcgcctgtttcattgttgaaatgctcctctgcattacttaaatttctagataccaaaatatcatttctatctaacaagtacctttttaattcgtcattgccggttatctgcattatttagttatcaattaccttatcgaatttttgaaataagacatctgagattttattgtttaatacaatatccacttgtttatttttcatttttcttggctgcaatagccttatggagagaatgtaaagacatcattatacgattagaatttttctcgttcgtcatatcatatatatacatttcgtatctattaagtatgtcatgatgaatatcgttgatagattgctttaatcgtttctataaatcgaaatatagtagatttcaacccgttctaaatgataatgaacaaatattattcaggttatcaaaaatggaaattatatcattttttggacaatatttgtaaattaaaggaattaagatttattaaaacttcaagcatcttacttggccggctcccttggatgtgattaacatttgtattaaatccctctaaaaagttgagcttataatatattctttcaattatttttcagatatcaaaattttcgtatgcatcattaatcatgacgagttttgttaaattagttcttccgaatatatctattattcgcaaattctcttgctttttctatgatactatgataagttactatttgttgaattgccatgcatattataaaaggtactgtaaatattatagccatgagaaaagatagatatcccagaaaattcattagagttacctatatccctttatttttatccagactattttgcttttttttatcatgttcggagcctatatcattgtcagtaacttttactttgttaaaaactgctttagttccggctttcaccttaattcctgtttcatctaaagtgctctcatatatatcacgaagtctttcatattcatagtacttgttgataatatcgacaatatattcaccgtggtattccatatctttatcatattgattcccagacattgcagatcagattgtataacatcttataaatattcaatactactgttaccaattatttttgcgagaataaattattataaaagtaatattgaactaatatctaaggttgtaattgattgttaatgttttatagtgtcgtttggagcggttttcttactacctttattattcgaggagtaatacttatttacattatctttttctttttacgatcatctgctttgctagcaatattatttttagatctatttcttcttataagaacaatatattttgaaataagctgaatctcttctttgaatccagtatatttccaacagtattagttaacaagagttgatataacaaaccaaataatactatttactattacagtaactaaaaatccataaaaataagccataattgttccagtcattgtacctcctatgagataaggcatttgacgttttaatacggattttactaaactatccaaaacgacttctactcattcctaattgtataacatagtttatagtcaggtgtaaggtgattgatagattattagatttaatacaattattcgaggataacgagtttaatcaattcttagttataatagatgacttccccaatactgtattataattataattaatatacaatcattacattcaatatctaaattaaagggccgataatctcttgaagaccaccaggtaaacaaaatgattatccattccatattattactattaggatctctatgtgggtgagaatgatttgattgattagcatcctaaactttttgtaacaagaccttaaaagagttttcaaaaatttaatagaattaaaaaattagggtaaatgatcttttataatttctttatcaagttctttagatatgcatccaagccaggtgaaaattcttgtgaagttacaataactattattccccagaactactgaaaacaaaaccatgaaaggtttcattcacaataaactagatggtaccatttatcacactatagagacccattttgaaaccttattccttttaaaaaatgtgtttatcttaatatgaaaaagaaaggattaaattgaaatcaaaaagattagaagtcaaaaatagagataaaaatattgaattgtattccttaatttactcagcgtgtcttggatctaaataggtgctgttgaattgtcagtacctgatgtcatatttccgcttgtcatatttgtggaacctgtatccatcgttgttgaacccatttcactctcagcagtcgtttgacctcgagctattgttgcggatgtaaaagtgcccgccatcaaagaagctgttgcaagaatactagcgattgcaaataagtagatcttattcatacgattttacggtataatttataccgtttattttttgtctaaaatgatgctatatttttaatatacttatattatatagtatattgggtcgaaagatctcatctattcaataaataacatgatattgcattattatgccgcacccgtacaactattgcattgggtcatcagatgaaacattatgaataatttagaatcctatcatgtgatcacaatgcattccttctccctttacaaattttatcatggaggatgatcctgtgataatgtaagtgtgaatcaatcttatggtcatcgatcaacatgacaagactaattgctaaattttttaacaggattatgaatataataacccggattgaagaacttgtcaaatgtgaatatctcgacactgtttaatttcataattatgatactcttaaaggtattcaattaaaccttgattttgctgagctttataaacaaatttgccataatgttattatggattgatatgaacaagattaaacgtaaaaataagaaaaagaatccatatagaagtagcgtaaatagaacttatgaaatggtttccctaggtcttcagagtgagttattatggctgatgacttatcaaccctttaacaaatttgcaattaacaattgcaaatcaagaataaggagtttaaagagtatgaaaaaagcttataatctatatacagattttggagaggtattctctaattatccataatggtcaattcctaacccaaatgtctcagtagggagtttaaataattttctcgtgaatctttgagctacaatttgattttgtaccctggtttactatggttcgacaaattctaatccctttttaattgctttactgtaattgtatatctgggccaataattatcagtattattgatcggagagaaactatcttgttttgttaatagttggagttatagatgaatcaaatgtaacaaattatctaaaagttttcaataatcatattatagtatcgatatgcatatccaatatctaggagtttttgaaaaatatttgcaaatgtatcttgaaaatgatatatctgaagttgtatgtccaaaatgcaataaaaacaatgataatttagaggttttgcgaatgcatgtttttacacaaagtaactttggtaaacatccgtattatgatatcatatgtagtagttgtcataaagtattcacctcacaagtgtatctttccatcgacgaggtataaattaggtcggtttcgaaatatatctcgcacaccgatttggattttagaaagattaatgatcttgatttagaatagaaactgaccttcgccaaaacgagaaatttggatttagaacgtgatcctcatattattaacagatttagttaaactgaacaaacgcttaattgatttgactttcttccgacccatgagataatgatctccttacaagaaagtcataataattgataaatagagtaaagaattcgtataattatcagatcttactattaccacctacggcttttttttggaacatagtcgaagtatgcgaggccccaatttctccaaatttactggctattgaattacatcagagattttgatctccttaaagtcgatactatgcgatatatcccctttgcaatatcctgtaatcaaaagaatttttacttgggaattgtattttcttatctccttagataattccacctcattcaattcatccatagacaaatccaaaagtatcaagcagtatctccttgaatattttttgaagtgatcaagaaataacaacggttgagtaaaagagatcgtatcaaaaccagatcttgcaagatacaaactaagaaggcgtgctatatcccattcgtcctacactatcattacagataagggcacggacatactctagcttgctataaaaagtatttaatcactataaagtcatttagtcaattatctataaaattctgtttattatcatgatttttagcgtcattataggaataaaaatataagaccattacaaaaacaagtttattcaagcaattataaacagaaagtactcatagtcatattacggtcatcagtgatcctttattagtaatatcgataacttaaccaggaacaaaatagcattataatctgatattgaaattagaatttaataccctgacaattaaagacacattcagaacattcaatggtgtataagggcatctatgatcatctatagggattttaaatttctaatgtaatcttcaaaagaaataggaaatctccaccaaatatagaactttatcactatttgtactttcttagtttgtcgactagaaacgttgccaaagcaatgtcatttttatgcagtcaaaagaaggccacgttatgatttcgaattggattcaaaagtaaagacctcaaaggactacatatatgtaaaaataatggtaaccattacaatagcagtcattatgatgaaattgatatatcagaaatatgaatgagtagtttatcactatttctcaaggatgaatatattctatgatatttgaaccatcgtaggtgtcgaaggtatccgggtttaaactatctaaactaaccaattccttatgaaggagagaaaggcgagaatacacctattttataatttcaaaatttaccatggcctgtaaatgttttagagcatgatcataacataaatattcagaacaaatggtacatctgcagatagaatttgaaagacaagcaatggaatcacagtatttgttaccattcttcttgtatacatcttttagtatcgatattgttttagtccttcatatgtgtcgcgatgatgcataattatttaattttaacatatcaatcacgaaagtatcataaaagttctataaaagtattggtatgaggctcatttgaatattgtgattatgttaagggatgttaaatctatttgaattttagattaattagacagacataagagtatatattaaaggttaggtaggcattaataagatttatatttaccaataaatggtaattcattcatttaagtctactcatcgtgaaatcttagtcatcgatagcgagaaattatatttttttacaatgtaaataatagattacctgtacttagggactgaagtcataaattattttgccagaaatctacattgagtaataaatttttgaattaaatcctttatagcatgattttcttggatgtttttctctccggctgttacagtttcccctagtttgtcatcaactaattgcaaattcaaataccaatacttaatcatgataacattgtatcaatagaatagtatcttttggagatgctatatttccatctcttagagcataggacacatttgcattgcaattagattattatcttaaagtttgtgtgtaaaatcacacattatcagtctgatttactagtcatatcgtctagttggtctaataagctactcactatatctaactcagattctgcctcaatgagttttccatcatttagtgcatccctagcatcatttacatgttgttgtacttcatctaggcaaatggggggacaatatgatacgctagctgaggtactcgaaaaagcatttgttacgacgccaacacttgataataaggcagtggttattacagctaaaaagacaaatgaatatttattcattgaaatcatattactctagcaaatttatgccttgatcacaattctataattataaagctagcgtcaattgttgagtgaaatttaccgaaaagattgaccaatattttgtgattcagataagaaagttatgttatagacatgacttgtatgatttgtataattttgtatacgcatgtttacattgcgcaaagctcaagccagtacattttctctaataatatgagtcgcggtattccatcgtttatccagctcatagatattgagcgattaaactggtccgaatttaagaaagaacaaccgaccaagaattacaaacagatattaacatgatatttgaaaacgccaaattatatacacaatatctatctaacaccaacagacaagtacatttctttttaaaaagtcattttgtttttcagttactccaaacttcagtcggtcatacagatgatccctctcacgctataaacaccgtctagtttttccaacttctatgggctcttgctacttcaaacactggattgtagtcaatcttcaccatagtaatcaacatcataatgtttgtagaattttaatcatatcagcaatttatcaaactcctgctgctgtttctgaaattttaactcttttatgtatactccactcttagtcacatatggtgtatgccgatggtctatattactccatatattcaaatttctcaataatgtcggtacacctccaatttccattggaacataaagtcatcgatattcattgtttaatattatcggaataatttgaatcggattataagtatcgttgcaaagacctttcgattatgaactagtcaccgcatttatcatttagataaaaaagtgtccaatttggatgaaacgaataaaaaatatgtctagactcaattgtgttgattatgataatttggcagggttttagtgaagtctattaatcatgaagtcattaatgtagttgggaatacatgaatgattatgagttttattctgacaggtttgtcacttgtgacaagtgtggtaataacatggcctatttgtggcttgaaaaaaaagagcaagtgtatttgattagttgtggtaattgtggtgtaaatgagagaaagatggcagcggcggagcaggttgctgagagcaaacagatattttgctgtgaaggttttaaagatttcttaaatcaagaattacatattgatgagaatccaagagtgtttgaggttatgggaaaacttttctactattttgaaaacagtcctaccccaattgttgaacagataaggttttgtcccttctgtggagttaaatcagatattattgagttggcgggataactgattaataaagttttgtcttgtttcaaacagtatcaagaattgaatggagttttgggtatgagatgatagcccacgtgtcttgatatttgaatttgcattttttccatggccttcaccactttttttgttgtatttagatcacttaggttaaacttgtcgtatctcgaatcttgatgtgtttccaaaatcaaattatcttctttagtagttcatactaatgtaaattgactaactatccgtatatcctagaatgtactgtccttgcctttatagaaaatagagacgacgtaataattttgtgggctctgttcatttagcaggttttgtctttctgttatgataaattacaaataaattcaaccaatttttcacatgctttaacttgcaattctttgacctacaaggaaaataatcatcgaaacattcagttctgtccttaatatattgcatagtcctttcaatcaaacttttctctattgaggaatggatatggtgttttagttttaggaatctacaatccattgggtaccatgttccaccatccgtagaaaccggatgttttccatgaaccttgactatgcctgacagaaaacgctcagcaacaaacatgtttctttccttggatatagatagtgcgagaatttgtctgttttgaggctctattgctacccaaagccaaatgtattcagagccaaccttgatcaatgtctcatcaactatgaattctgagattctttttgttttagttgaaatcttactaggatgatacttttgaatccagttccagatcgtcacatgatttcttttgtatatctgagataatctttctgaggctttccttaaggacagacctgaaaaatacaaatgcaacccataatatacatactttgaaggcgttctgtttctagtaagcatgaaggaaatggaatgctttcaagctatagacttgtcgctaactgaacagagccattttgtgaaagtgatctcatataacccataagctatgtaaataggaatgaatgaccgaaaaggcaaacacgtgtatctttataatatcaatcaagaccaagatggcgaagacactgaagacggtataactggaacatggtcttttaccaaggatgataaactgtctcaagaattagcagagattacatttaggatgtcagagggtaaagatacagataaggacggcaaaagactgaacgagataatcaaaatagttgaacaagatatatcggatgtcgtaggctatcgagctacaataagtgataatggcctattttatttagataatgacacagaactaggcaagtggtttaaggtaatgacttgaaataatacatagatcccgaggcaataacgctagagcctattactccatatattcaaatttctcaattagttagataaacctccaaatgctttgtgacatgaagtggtccaagtatactagttttaattaatttattttgatacttttgatgatggtccttaatgatagagaacgaagtccttattcagtctggcttaattgttctcttccattgctatattgaagtaatttgggtaggatatttcccctcggcattatatggattcaaacatagtttaaatatgatattcaaatgccttcgttacgaaaatgaaccattgcttcctctgaagcttaaatctgcgtaatactaggattttgaacccagtaatgtaaaatttactctactaaattaaggcactgcgctactgtccagtttcaaagactgtccctgaaagatatttccatgagagtaagattttcctgtttaggaaatttcgagccaatgtgccttctaacagtgtaaatgtttcaccgatcaaagacacatggtttgaaagttgttgtttgaaacatacatgttaccattgtcatggttttaatcccatttttggagagtagaaggctaattggtaatcaagtccgaaataatcaacgacgttgaagaattagataggatgggttttacattgaacttatatggagtttgacaaaataggagtgcaggatatattgttaagcgtattacatttttgggaagatttcttatccaccagttttctaaagcaatgcattgttcaaaatatttattcttaaacaacgtacctgcacaatcacatacaaatcttatctttccagtttcagagagcatcgactctctgcttaaatatctaatgaaattttcaagtgggacgatgttataagacagtgaatcaatatagtattttgaaaaatccatcaactgaaaattgtgctttttaacatttttctcatagtcgataattttactcagaaatacgggtgatatgctatcatttccaatttttgccgtagcgtaaatgcagcgatcaccttgcatcaaaccttcatttataaaatcagataatgcctccatcgtggtatcatttaggaaaagttctttatcatccacggtcattaaatccttggataattccttggttatcttatcaccgttagccaagcagatgtagtgattacgaaatgggttatggaaaagtttattgttaccactactgctactgcttaatccattggtccaaaccaatccgtggtttaagctcagtaatgcatgctgttgaggattcattctgtcaatatcatttcttttatatgcatagacagtggagataggaaaagacaagtagctttgaagtagttcatcgaatttgattaaagcgttttcgaacttctctatgagatatacatcagcctcgataaaaactctcaacccttcctttttcatcttctttgcatttgaaacaattttttcccattctgcaagaaacctttcagcgttaaaatcgctgtagtggtagtggtaccaatttgatattggagtgattacaacactgttgctattatcgattcctctagcattatcttttccaaattcactgtagatcttgtggtaaagtttatgtattgatgggtcttctagtattattaaaacaaatacgttgttttccaaaccttcctttagaaatgaaaagcaatcatcaatctccgtgtctttgtttgggtatactataaaaatatggctatcattgcccaacaaattagtcagattcacattagttcattttttgtataaatagacatcagaaatgtatcacatctaatgttgactttaattctgtcaattctttatctatagcacctctatcagacacatctgttgcatacttcagtaacctattgcatgcctggatttgtgccagcattatttccctgttatcaagacataggctataagatgattctttaaaatgataagtaatactctttttcttattaaaaccgcaggtctttgcttctatcaagaatggtgtctcagattccaagatgttcaattttgtcatcttttgaattgagagcttaaggccaacatacatcgagtctttgatcttttcatatacttaatacggtttgaattcattggtattggagcttatatcctataaatatataaaaactaggattcatttgcaataaaacgatctaaaatcaagacaataattacaaaactattattctagtgcaactatcggtcactatgaccagggtaaataagaacaaccagcgtcaaaagtccgggtcaggtagcgaaagcattactttgcgatttgacaaaaccacattagacgaactacgcaatgaggccgaacacaaattggaaagcgtgaacacgctcataaatcaaatagtcaaggcctatacactatggcataagccggctgcgagcacaggactgatttacataaacaaatacctttatagagatattttggcaaatctatcagatgaacaggtaatagaagttgctgacaaattcgtcagtcactactttattgatatgattgaaatgtttgataacaccgtttcagccgctgtatacattgacatcctgctaaaatggattgaaatctcggaattcaaataccgcatttatgaagacaggcaattagattatacaacatacaaatttcagtttgacttaggattaaagtttagcaaatttatggctagcataataagtaacacgatggaatcgttaggtcagacagaaataaaggtcgaggttacagaacacttagttatactcaggctcccaaaatctatcaaacgataaaggattaggagaaaattgtgatattaatataaaatttaggtagtacagaaagtttagcaatatagatatggcttacatatcattagcccagtctaacatttaattgtaaaaagtatcaatctaattttggtaacataacgaagaaaataaacagatattagaataattattatgaccagtgatcctcttggtcccttggtttatacccacatttgagaaacttccgaccaagcccattgaataactataaacatattaaaacaatgggatgttatgtaaaattgaaattttcatgatttatgtgatcaaattaaaataaaaaggtaaccacatcaaagcaaatataaaaaaaaggaatgtattgattctctaaaaaactaattttctgtttttacgaatggatcaattttttgctcgcttgaatatatattatctgtattgttaggatctctctgtttatgagcatgtttgatgtgatcatctagttcaatcttattgcgcgcaacaagtccacatatactgcatctttctccgccaggttttttatggtctgaattttttttttgtgaaaactcttgcaccggtggtaattctgatcctggatctgaacccatatttaaaatattgaggtttgaatattaaactctttcaataaaatcaaaaacttttcagtttatcaccaggtgttttactcatcttggtttcccgttagtgaagtaaaatgtaatttgaaaaaggtatgaggaattagtccctcgagattgctaatagatacttataagttgttgtgctttttctatgttttcgcaaattatttatccagcataattctaatcgcaacaaaagggccaaatgtgttaggaggatcaattctaagacaggcaagacaggagcatcgcttcttttagacaaattttataattagaaacgatgacccggtaggaatctaatagaaaactggggagtatgcaagataaaaaagtttttaatgccatatttgagaacacaaaattctgcaaaaggacccggaatatcaatattaactatgttgtaaatatgatatcttattttgaaagaatcgaatgtattttcgtcatcttcctcatgaatgttagacttgataccttcttcatttagatctatatgttatcgttaataatcagataccaaaacatagaacgacattacaaacatcaaaaactatttaagtttagatccatatgggtagttattcgaaatcgtatgacccagataactcctaatgtccactcaatagaaggtataactcatcctgatccgcgtggaaaggtatttccttatttgtttgtggaagatcaagatgatttgacattgatcgatccttcttttctatcacagttaccaataattgaaaactatctgcttgatataggttatgatatcaagcatgtgaaccgcataatcctaacccatgtccatgtggatcatgcacaagctgccaatgaagtaaagaggaaatcaggtgccaagattttttcccactggattgaggcaagttatctgaaccagaaccctccatacctgggtcctccttctaaacaagaaacggttgaaaaattagagaagattggagtctcaatgggcgatttaataaaggaatatggaagtttcgatgtcgaacctattaatgttgatcagcaggtgtccgatggggatatgattgggagtctcaaggtcatccacactcctgggcatacacccggacatatatcactatatcatgaaaaggataaacttcttctgggagcagacagtatatacaaacacgtatttggtgcagagggtatgtacatatctgcaccccaagtatcgatagacccagttacagcaatagtgtctgcacaaaggctctctaaagttaattttgataagttattgatggcccatcaggattcgccattgttggaaggagctagagaggctgtcgaaaccctagtgactgaaagcataaaaaaactaaagggatagaagtgtgaagccatctaggttacatttctgattaaccctgtgataacctcctacgctttttagttatacagcaaggatcagtcatagtagtctgggggtcgggccattgaacatctttcagtgcgttactctaggcatcttgctacctggcaaagccttgaacaagattatatgacctgttactccaatagtatattaatcgttattaagctcctcagatacctttttgtcttatttgtcctgagaatttcattaaatcaaatttattgtaaacctactaatcgacttgaaaatataaaaccaaatgaattcaaagtaatattatctctaaatcgtgctctcttgttgattatccttagaaaataggatttaagaaaactttctccccagttatctgcttttaagatcatttccacgcttggaactatgcctatatgcaataacaaaaatgagctttcacataaagataatttgtagcttgatgattatattctgaagggattattacccgatataagaattatttaaggtagatccattagatttgaattgggaaaagatattttaagtaaaattgggatctagttatttcatccaggatagattaatttgcgcagccactatgaaaatgattgaaacaaataaatagaaaatgataaaagatttgtgtattattgttgggctaatgcgttatttccagaattttcttggttttggaagttgaaattgttgccagaatccttggtatcacctccagaaacgacttggctgttctgtcttgatgattgagattgaacaattgcctgggatgcactattaccaccatcatcatcgttactctgggctaatgcattgttaccttcattctcttggttttggaagttgaaattgttgccagaatccttggtatcacctccagaaactacttggctgttctggatagaacgttgaacttgtgctataatttgtgatgcactattaccatcatcatcattgtcattgtcatggccttttccacctgcaaatgcgatgttattggaaaaaatcattccaactggagatacagtcattacaactgccattgctgttactacagccaaaatggaaatttgtttcttgttgatattgatattagtcaatttgataaatacaacataataatatacgatataacttgtatcaaaaaccgttatcgtaaaattattgataagaatctaatataacagtttactagattcttgaaaaagataaattaaaaaattgaagaccataaaatctaacattcatgactattacagtatagattgatgaagatcatggtcacggcatttgatcccagattactagatttagtagcataattcgaaagaagaaatttttgatatagcgtcttagaaattcgctttgtcgaactcttgtatatggtccaattcaaccataatatgtcatctaatgattacatacaacatatttaaagaagtgtgtcgctcaaaataagtcatcgtgcaaaaggcccatggagtgactttcatcataaaagagatggtaaagcacctcgttatcttgctatttattaatggtatattcctattccttattcacaaaagcacaaaatcagcaacaagatacaacatcaagttaattggacagccgactaactactttgaatttagcgccgccgtcataggaatatcgtctgcagttattgcaattttgattgtattggtattcgatcaaaacgtaatgataatcattgctgctgtattcatttctcttggggcgggacgacagatttttgcctcggcacttgatgtcataacaacaaatctgaacgactttttgtcatcttgggcatcaattcttcatttgtttgcaaagaataggcatatggggacgacaactacaacaacagattggcattccatcgtaaatcatcttgaactgatactcattagcacgggtaggtatgatttgcctgttaaacttgatggggtaaaaccggaatctcagcaaatattattggattatctggacgagcataaattggagttacaatatcaacaggctattacatacgatgatgctagctgtcttgcatttaccaaatacgcaattaaacagatgagagagaagttgctgttatataatgaactgcaagaactacaggaaagaagtggaggcgttaatgcagtaatcctgatcgcattgggaacgttgatttggttaatttcatagttttgtgttactactattattgtatatgcaataagtgaacaataaaatccctgataagattttgtaaacacagagatttcatctcaacaaaccaatatatggcgttaccctagccagactgtgtattgatggtaccggatgtcagaacccaaagaattatcacaatattgttatgccactggtactaaatagcaatttttctacaactgaatatgtttgatattcctgttccttgccacaaataacccaagaataattaatactgcaaagaaatgttatagtaagacagaggacaggtgtcatttatcctagattcaacaaactaatcaatgcccttcgtgctgccgtgagaatgaggaactatgctagataaagaatcaactggataaatcaagaatcacacacacggtgagaacaaagtagacttgtaatgacctgcattgttagaagcttttttccgctaggtattgtatagatacatacaacaaccatgaggacaaatcagtcttcaatcaatgcttagtttactcctgaaggaacaaatggaatctgagactccttacaaattgttggcccatcatccctggcatcaaaacaattaacatcagttatgttagaagtagactttttacaggaaggatcctcgtctgttgttgaactaaaaggtgaatttggaaacgcgcattcatcttctggcagcggttgtccttgaatttgaattggtaaggtaattaaagtaacagttgtccataaacaaggatatcaaatatacaaaatgaaataatcttttatttggcacacattattgatccaaacctattttataagatttgctattacttttgaatatttcctcatcctatgacatacattaaattagtggttaaaaccaatatgggtctcgttagacattcaataataataattcattgtatttggtaaccaatattgataacaattcattataatataaccagatcttagttcataatttgaataatcagtgattgaaagtagaatagatctattcgtttctcattatcgtaaaattaaaaaaaatcaagcgatttggaatcgtaatatatctattactaaacccacggaaaccgatcctttgatgatcttgatgagacccaaagaaaattcctgctagatgattgtcaataggatatgcgtttgaaaaaggttacaccagtgaataacccaacccacaaattggaccgttaacaatataacttcgacccggccatatgggatttcgaagtatttgttaggttctttattatcatttgaaaatttcaggcccatagatgcatcatcttgattttctaatgatatattcgtattgtaattcgttatggtaacaatatagccagaagtcctacttacctattgatttttcttctactcataaactgaaaataactgtattaacagatgtaaaatatttcttagatattattaaataattcgttttgataatatacttatgtttccagatccgacagtgtttccagatccgacagagtttatttctgaatttattctaccatcctttagaaaaattctagtaacccatgatggagaagataaatcaaataaggcgattaattacgctatttatttatcaaaattgtctggtgccgagataacaattctacaaataattactgatacaaaacaattaagagacacttcaggaaatatctctaacaatcgaccatattcaccatcgtcatcacaatcttctccaaaaatatcaaacccccagtcaactgctgcaagaaaacaagattacatgaagtacattgagggagacttgatagattcgatggaagagaaaataaagaaaattgaacatgctggttgtaagaataaagtttcatataaatttaggacgggtaacataatagatgaaatagtaggcgaaattaatgaaatgaattatgacttagttatattaacatcttctcatttaagttcctggatggaatcattgtttagtaacacaaggaagataataagtaatatacacaccagtgctttgataccgcaataaatatcattattaccgcacccttatgatttcgaattgagcagcgtaattaatttcattggatagctttctaaatatgcaggtagacagacaatatagctgcactacaatttagtagaatcagttcattttttaatttaacatttatttttatctaatcaaatcatatataacatacgatgcatcatccttttcgctaccttaaataatgattatcaaaataacagaatctcaacgcatatgatcataactcaaccaaaccatggattttggtcatacttcattttgaatatgttactcaattctagaaaatcaggaataactctttatattcaatgctcaaccgatcattttctctcattttgaatctcagttggactagctaaataatttgctgaaggctaattgtaaatattaaaaaaataagggccatagattatttatcgaaaatatcattgttgtgaaatccagtaaaccgatattgatttgcatggtaatcttttatatttggatagaccatgaatattcaatgaattttaagcctaaaacattttgtacttttgtactaattacttttggtctttttagtatcgttgaaatcaacttatatcaaatatcgtatgcaacaatctgtttcgattgtcctgatgcgaactttcatttagatgaagctaagaaatcaatagataacggcgactataacggtgcaaaaaatcacatcgaccaggcaaagcagtcgattggccaacatgattcccctaatcagactgatagcctgaagacaaccaataatactaatgctgcagttgaataaaataaccctgcctcaatagctggattattaatatatccattatttctacagattttactaattaagaatcatgtaattattaattagtgcccatagcgactgagaaaaaaccattgctagatttatcaactctttcttaagatcaacaataatctattatccgaaggaacttattccccccactattccggcctaaccatcgtttgaaaattagaattttgtctatgcgatataaattcaaacatgaactatagatttaagtgaatatgacctaaatttcacggtgtatatagatcatttaagattagaaaaagagtgggatctcgttttcacataaataactaatcccacgtcctatcgtaattattagacaaaaacctagcaaaattgtatcgttaacagtgtggattagacccagctcgttgaatttatagatatatcttaatcatagtcataatttggttgactaataaagtttttaaatcaatatattttctgcgagtacagtggtttccgattttgctggtattatttttggagtagttcatacattgatgtatcaaataattaacgccgattattgacccgaattcttattctttctttcttttatatattcaaagaataaggttgataacccaccggcaaatcctgccattattaatgttatcatcgaaccataggctgaccaaaagttttttagttcttcttgaaaagttaatggctcgattacattaactgtgaaattcccatttttgatttcgtaccctttagtatcaataaatattggatatttattctggaaatcgataaaattcgtaggaaaattggatccaaatgaaatattggccgtaatcggaatagcatgtatccctattttagcatcttctggaacactaattccgatttggacaggttcggtagttgaaccgccgattgtggaattagtaagattatcgttttgatttattaattcaatatcaagagatgtataattttctaagccagataaatcggtaatggcagatattttgccactacttgataagatttgcagtcctattgtttttgtttcaccctttcttaaagtgatatcttcaggtgatgtagatattgtgaatgcatcatcaggaatatttatccaattagttaaatcgattcctatcgtcccatcattatatgatactaagttataaaacatcattctgtatgatgggctgacagaaatttttcccatatcgatagaaaataccacataattgttattcccctcaaaactattgtaaccactatagttttgttgcagatctatcattttatattgacccagagaagaatattccagtaatagtttgttccaattctgcaaatttactgaaccagtgttgttaatccattggagttctaactggtagtcaacaccttctttacccgttgaagaatccctgtcaccatcaattaatatcccatatgctacggaagagatattcttgatattgtccgatctcaacagattatcaccaatccacattgtagaatttaattggttcattttttcaaaaaatgcaactctttgtacatctagtgccgacgttgagagggcattaaatgacttgttttgaactatctctccggattctaaacttattattttaacatccttcaattcgtccattatttcttttcttggaatatcagaataaaaggagacaacaaacattggaataaaatataataaaaggcaaggaattagacaagctacaacaaggattagtgactgcatattcttaacaaagcaaaggttgacgaaaaagttatttgattgttgcttgtaaattaccatctaaatacaacctggtagtaataaccagcagaaaagatgtactatttcaacatcaattaatcaggttcggttagtccgggattaaatcatccaccctttggctaaagatggaagacaatttgagttctaaatcattattgtaatatcgaacataatagtaaataatccatgttgatggatatcaagtggatcaaataaatattaaaattgaacggttgtcttaacataaccataatgcttcttcattcctttgctttgttgtctttgtttgtattgatctcattttttacatcaaacataatcctaagtaataattcaatcctaggaatttcattccagaaggattgttgtcaacccctgcttctatcccctatggcctcttcaggaaataacctctatattgtatggccagataataagactggaaattgggaattattttttactagaagtatggacggaggacatatttttgaggtgccaatcaacttaagtaataatacgtctttttcagccaatgctaccataatagctcatgaaaatcatgtatccatcacatggtgggataacaagactggcgaaatacaaccgttcgtaaggtcaagtcatgacaacggcgagaattttgagaatgctttgctgttaaacacttctttcattggttagaagtttcagtgtatagtcaaaataacatccagaaattagtaatagtaaataggaattgaattcattattcaatcaatctgagtattttccattattttttttacaattttctaggtttgtttttttatgtcagtgatatatcttactcttttaccttgttttcttaaattaattattctgtcttggatcacagatgattcaaaaattaatggtaacccatctgtagttccataaccgcctaattgaatgactgaattaaagtactttaatgaaactatttgttatatctgcggggttttcaagaatcttaaaagacaaacctatcccccctgagactagatgaattaggtgcataataaacagatgggaatgcgtgctctattatcaaaaaatgataaatttcatattatttaatactaaacataaaatttctaaactctaaggtcgattataacttatcaatagtttttaaattaacagggtgtatgccttttaaattctcaatacactagttaactggctgcatcttactttttatttggtctaatataggcgtattaaaatattctagattcatcttatggtcattttttccatgatttataacttttataatttctgtttcatcatccccctttactacataatcgtaatcaaacctacaattgaaattgataagatctttaattcaactcctgatttatttggaggcaaaaaaacccaaactaggagaatatgatcaggcattaaatactagtttaatcgttatctattgaaaagaatacatcttcatttcggtacggatgatttgaatagaaggcatgcacaatcgtctaacttgctcctactttagtcaagtctagataaataaattttattgtaattaaataccatcctaaacatatctcactaccgtatacaccatctcgtagactcgagatgaatcctaaaattggataaggatgccatagcataccagaacaccctttttcccagcctcattactagtgctactgtatctttttaatacttcaggattgacctataccgataggaactaaatagataacaaagtagaaagcatctatattactatattactatattactatattactatattactatattactatattactatattactatattactatattactatattacttattccatcgttccaaggcaaagactacgttcaactgctatcctatatcaccagtcaagtctagtgctgattcggttgcgatgatatcttatattgctaaactggcttgtcttgtccatagtctctaccgccgatgaccttccatattctctatacgaacctattcttcatcagcggaaacctgagttaaaaaaaatcaattacgaccagggatgaatgaggagactataaagaaacttgtaacctagaattccgactcattgttctgtcaaaacacccaccattgtattcatatactgtgggaaattgttatttatgtaaattacaaccatcaagttagaatatctaactatagtaactatttactcaatagcctcaaccagtgctatctagctttttattaacgggtattagttactcatatagcataccagttattctactattaattgtagaatagtcaatacatatgatcattattaatataaaagaataatgggtacaatagaatcatatgtaaactaaactaaacaagtagagatataatgagcggttcagggaagattcaatttttgatgtaaagagagatatcatggtgaaaattaacctctgggtttgatatgaaggtcaacaataatggcattggttataatatttcagattgtataaatagctaggatcacataggtttttgaatctttcattgttatccgtaggacaaccttctaaagaagttgtagtatatcgatttggagactcgagaacccttgttaaatatgaatcaaaaatgtgcaggttcatattcatcatatattatcattatgaaacagacaaagacacagtctattgtaatcaatcggttttataatcacttgacatttagaaccatatttttgacatgtttgatgacataataggaccattattgctagtacttatttagatttagttttaatcaaaatgttcaatttttaacggccagaattagattttgatattaaataggattatcattaagagatacatccaggttagaagtaataagcctaacctaattactgagatttgagagatgtcatgtcaatgcagaagcgatactttacatctgcgcgggacaatcgctcataagcctcgttgaccttctgaattggaataatttctacgtcagaggtgatgttatgcttgctacaaaattcaagcatttcctgagtttcggcgatacctccaataagcgagcccgagaggctgcgacgattaaacaaaaggcttaaggcagatatagcatggggcttgtccggcgcgccgacgagtgttaggttgccatcggggcggagtaattggagatatgcattaatgtcgtgctctgcagagactgtgtcaataataaagtcgaaactgcttacgtgcttgctcatctcatcggtatttcgcgaaacaaccacttcgtctgcgcctaggcgcactgcatcttctttcttattaagggaagtagtaaaaactacgacatgtgctccaagtgcatgagcaaactttacggccatatgacctaggcctcctaaacctaccaccccaaccttttttcctgttgtgacgccccaatgacgcatgggggagtatgtcgttataccagcgcataaaagaggagcagtcccggcgagattcaagttcgaaggaacgtgtagaacaaaatgctccttgaccacaatactgtcagagtagcccccatatgtgacacctccaaggtgagagtctggagagttataggttaaggtcatgtgtggacagaactgctccagaccagactgacagttgggacagttaccatcggagtcgaccaaacagccgactgcagcgaggtcaccgggcttgaacttggagacagcggaaccgactttgatgacacggccgacgatctcatgtccaggaacgcatggatagacagtaggcattgcactccattcattacgtacttgatgtaggtcagagtgacaaataccacagaaaaggatctcgatctgaacgtcgccatcgccgggatcgcgtctagggatcgaggttgggactagttgagattttgggtcagcagcagagtaagcccttgattcatactgcccacgtgactgggaactaaattgagtggttgacatgacagtatgaatgtggaaagggtataaattgattagtcatgggtggctcacacccctcatgaaggttacatgcatttctgtctttatctttttgttttgagagcggttaatgatgattcaaatgatgagtatagattaaataaaaagataggaaatgtggtcaaaatgttgttttatcttgtgaaagaagtcgtggtattctatatgttactaatgtaaatagaggacagctattaagatagagagttgattgttgtaatagtttgaatgagagtatagcgaatatggtaaggatatagattaataatcttcggcgacattagcagaaatcattccaacactaattccatcgtttgctctgtacaactataagcaatgaaaagtgaaagagactttccatcatgcaatcaatagaatacaaataaatcaattgttgtgagccgttgcaattaatacatcccacggaaaactaagtatcccagtattatctgcaaatcgattagcgcttactttcgattcctcttttatacttgaaaatacatgcgtgccttttgactcaatcattgaatgtattgaattggcagtagatgacatatagtcggaccagtactcatcataggtaccagctttataaagaaatgtgtattttctaattgatatatcatgaaaatttgcattttctaatgcatcgtataaatcatccggattaccaaaactatgaactgatggagcacctttgggtcttatatcaggaatatattttaagatagaattcgttatacagctaaaataaggaacaccttcagaagttccatgtacagatatgatcaattttcctcctttgatcaagatatcgtttagttgtttaagaacatgcactgtatttggaaaaaacatcaagccaaactgacacaagatcttattaaaagaggcgttacgaaaacctaaattctccgaatccatttcgataaaagaagattctgggaacctatgatatatcgacgatttagcgatggaaagagcgacccttgatatatcaattcccaccagagcagatatattattaaaatgatcacctttgcggttattatagatctgtttaattacttcatttgcaactgcacctgttccgcaagctaaatccaaaaccatgtcctttttatttatttcggctagtttaaccaattcaattgtagatttgaaaggtcctgtgtaagtacttgcccaatcctcatggtatttaagagcaacagtattccaatttaaccttgtattatccttatattgaatggaatcaaaattatgaggagtagaagtcaaagattaattacccaattcccttattagtattcatggattaataattattatcatgattaatattttctgtcttgaaattaattttttctccctccaaatcacaagaatgtatgagagaagtatctattgtaaaggacattgagtaattcaatgatactagctaaccaatttcaacatcatcgcataacaacgtaagattcgatccatggcgtttattaataaaaaaatattattgatgtagatatagcaaattcatatctttatcaggtacaataatatgtagtataacatgtcttctgataacaaagcaagtctaattctagacttgtacaaaatatatgatacttatagagattccagactatggtttttagatgaactagatgcaattagttacaaagagtatcatgaaaaatattctggaacatcaaaagaaaggtcgcattttattgcagtgtgtgggttctttgagttatctggtacacttattaatcatggtctaatacccgcagacatatattttgatatttttaatcctagcccattttggctcaaagcaagatctataatagaaggaatgagagaaacaagaccccatatatatgaaaattttgagaatctaactagaaaaagaaccaattggaaagagaaaaatcaaaaaatttagaacaggatagaaaggcatttgattaatgtttgtagattatctaataaggtccagataatctacaaagagatccgataatacaacaattacataattacaaaataatcaaaattattagtttcttaacattaggcctgaaatttgtaccgctaacgacttaaatcagatcccaaatgtgtaacatgaaatcatttgcagattttgatataccgctttggaattcttgcttgattgtacaagatatttatttatactagttataaataccaatacgatctgttaatgatagagaaaaaaaccatatttgcttttaggattcccatcttaatggctgcactgataattccagttttatctattggaataaatcaatcctattcagaggagacatttgtgtatgtttctaatggcgaagatggagatattgcagtcatgaagctagatcctgaaactggtgacatgaaaactgtggaaaaggttcctgctggacccaatgtaatgcatatggcattgagtcccgatcatcgattcctttatgcatctattcgttcagaacctttttcagtggttacttattcaatcaatcctgatacaggtaacctgaatgagctatctaaagaattacttccttataacatggcttacatctcagtggatcaaacgggacgttttcttttttcagtatcgtatagtgatgctaaaattgcggtaaatccaatagggctcgatgggattgttaaatcagaacctattcaggtaatttccacaggtcctaatccccactcgattttagctgatcgaacaaatcaatttgtgtatgtacctcatttgggaaatgcccagataaagcaatttttgcttaatgcatccacaggaattcttacaccaaatgatccagaggcggtattcactaaagatggttctggaccaaggcattttgatctctcaccagataacagatttgtgtatgtatcgaatgaaatggatggcatggtttattcatataatataaacaataagactgggattttaactgaaatacagagaatttcagcaattcctcttgacctaggtcttgaacccccaactcctgccggcggagatggagatggagagtcgggaatggaagatgaggaagttagtacttttggagttgcagatattcacattactcctaatggtaaatggctatacgtaagtgtcagagctactagcacaattactacatttggtgtggacattcactcagggaatttgacatacattggaagttatgatactgaaaagataccacgtggtattaatatcgatcctagaggtaattttgttattgcagcggggcaggaatcaggctttgtatccgtacatgcaattaaccaagaaaccggtgcattaaaactcttgaatagatatgagacgggcaaagaccctaattggatcgaaactgttgaatttaagtaagaatccactatagacattttgagtttgggaaaagtcccagcgtaataggcaatttatttggtaattacaaacctggtcactcagaataatatcgtaaaagttccatcatgttcagttctaattatcaaatactatatcaaaacaatagtttgggatattgttttgttcaggtgatcaaaaccacatttttaattctaacataaactatttctcaatggcaatcgactatttgactacatactatgtcttaatttgttttgcttatttatgtacttgctacactgaaaaaaatgagacctttaatctcaaatacttaaaaagtggaatttaaagccgtgtttattgatgactgcagccggtgcaaatacaaacttgatgcagacagtcattttagatatagaatttgcttcatgacttcaggtttttaataaaaaatgaggtttataagcaatgttgaataattattatacaaggtgggtttccctgtttaccgaagtcaatcaatatgaaatggttcaaagacaaaaccaagggcatgaagatagtaccctaaactcatattatgatgatcgaagcgggtatcggatgaaaatttcagccttgaacgatagtagtattgtggcttctcctcctgacggcgataagaaaaatgaattggttgatatcaaatacaacacgtcatttccaaatttaacaagtcaaatacggattctaattatcgaatctgaaccagacatccgtttattatttaaaacctatcttgatttggtgggtgctgaatcaataactgctgacgatggagataaggctattggtattttccaggaagatagaaaccatggtagaaattacgacttcattctaatagacactcatttgaaaggtagactgggtattgatgttgcaaagaaaatatactctagaagtccaaatcaaagaatagttttgctaacaacctatatgagagaagaattgtctcaagcggctttagactctgcggcgattaatgacaaagacatactcgtcatgccatttaagctagcacaattgcgtacagtattaaatcgggaaagttgttaactcataatttaacttgtattcatgcaaatatggtgttaactctaacatgataactgtattaactgataattttcttctaaattcatatgattttgaataattagattgagaattttagtaatatgaaatccaattactgtatgtttatttttttttgaataaatcgtaaattcacaatttatcatcttcggaacgattttgagtcaaaaaataatgaagaggacatgtgcgctacttaactattcaattactatatgtttaaaagccttccaaacgataaaagagtgaaccatgtgtcaagaaaatctgtaaaaaatagtgtcattagtcccaaaactggaaatatcaatagcattgaacaatattcgaaggcaaaaagcagtggaaaacaaaaactttcaggtgtggggaaaacaattgttttatcaaataatgttcccggatatagggatgaagatgattttaacatcaaaataactcaagctcataataatgaaagaaacttgatttctacccttgataatattaacttaaaaattatagaagaattactcaataatggagacataaaaagttctgagattgctacaaagcttgcgatcccactttcaactattcaaaggagacggacaaaaattgagaaaaccattgttcaaaaaacctatgaaatgagtttaaatcaaatgggatttagaactgctcttatatttgcagatgttcaaaagggtaaggcaaaggaaactggagaaaaattgctcaagagatatgaccattatattcttagagcatctacaagaataaatagttccaataatctatgtcttgaaattatttatgataattcggaggaactacatgctctattagaggagataaaggccatgcctctgacgaccagtgtcgattggtctgaacaagtttatccaattggtgacaatgtttctagcgttgttaattttgcgttaactaggaaaataaaggaactagaaaccagtaagaataattaagttagcaatttctttttattcatttaaaaacaaatgatgcaaaaacccgaatatccgatatctaatcttaaccaagttatagtaaatcatctataaatgaagcacggtgatttatttgtcatatattctattttttttgatttaatgcatcacgaaacagttaaaagatatatttaaatcccataatgaacaaaaattagatgtatattgccagaaagagtaaaacggttcaatattggtaaagtaaccaactctagacagaaagacttgaacggcgattctactaaggaagaaaaatccaaaagtagtgatttatctaataagaatgagatagatcaattatctaatccaaatatcactgataataattattctcacatacatcttgataatattaacttaaaaattatagaagaattactcaataatggagacataaaaagttctgagattgctacaaagcttgcgatcccactttcaactattcaaaggagacgaagtatgttagaaaaatattctgtattggagaaaacttatactctggatcccaaaaaactagggcttaggatatcggaaatctccattaatactaagaaaggaaacagtcatgaggtaatgaaagaaatttacaaaagccatagaagaaatatagttgatatgtctttaagaataggagatcctgatacaaacatctcttttagaatcgtatacaaaaactcggtttttttatttaaccttttagaagaaataaaggaaaatgaaatggtaaacggagttagctggtctgaatatatcagtgagaaaaaaaataatcagtcttcttttgttgacctattttcctcttaattaatctacttttcaaaagtcaaaaaatcatcaatagatttaatctccgtttatgcaaaaaatcaaggaggaatacatggcagaagagatattacttggttattctaatgtcgtaaggggcactagatcgcccctgtatcgccttgttcgtaactaaactactaggtacgtaaatattttccatcagattgacttcaaatactgggtagcgaaaatattgatgaacctaaataatgtatcatttttgtttattgtattaaagatatggttaaaaagcttgttaaaatatataataatggcttgcaaaatcaagatcaaagatacgatagaaataatgattatttcgatgaaattgatgtccggatcatggatttgctaatactgggaaaaaataataaagaaattgcaactcaaatgaaaatacctttatcgaccatacaaagaagagtcagaaatcttatctttagtcagtcaattattgtaaaatcaaatattaattatgaaaaatttggttttaaaacaggcttattatatatttatttagtggatggagatatcaatgaaacggcggagaagattagcgaaattgaaggaattgaatctgtagaaattcacataggaaactctgatattattgcaaacgtattatataagcatagtagagaattactacatataatatcacttgtaaaaaaaacaggaaaagttgaaaaaatagtgtggtccgaaatgatatataaaatcccttctaaaaataatccatctcaattcacaagaatggtaaccagatgagtcaaatgtcaatttatcaatttttctcgtagaaatcgaaattatatttctaaactttttccgttttccatctggcgattaaaagtaagaaataccttctatccagacacaatctattaatcaaaaaataccaagcagattagggatcaatccagccttatgcagataaatcttagtcaaaaaagtatttagggacggtacttttctcaatccgatcatgttgtgaaagatatgaggtcaaatagtatatgtcttagatatccgtctagagaaaaattaaatgaatcttatcaaactgagtatcctaaaacaaatatcaaaaggaggagacatttaatgatctatactgttacagagagaaaaaattttgaaatcagctttaatcaaattaagtgagattcatgatttcttgactttttaaatttctgactaattattcttcattagattagattaggacaacaattgctacatgattgctatcgcatctttgggtaaaagattgctatgaaatcaaatcaaagataaagcacagcaaatcattaatgatgttgatattgcatacaactataggcaaacaaaaggatatgaagtagattcttctcaatgaatttgaggattattcccagtgaaaatcaatctttgtcagtagaatttgtaatctggaatgagtcaataatttcgtttacaactggcaagtatagattatgtacttatcttgagccacaaactcgatgatgtaaattttatcatcctttatagtataaatttctgtagcacctttactgtttttgtcgtaactgtaatctaaaaatatttgatgagcggggttacgtgctaatgttgcattctgattccaacttttaaggtcaaaatcatgacaataaatccctattgcacctattctcttggtggccacagtcagaagtttattttcgtcgtctgtttcggagtcattttttttcagataattaaagatgttgctatttgtaaaatctccaaaggtatcataatcttcaacaactaatctaatactattatgagatgctcctattttgggattatagtaatcactttggataggagctaaaatttcagctacaacattaagtgttttactttgattatgaaaaattgttgccacacctccctcctttattgtccaatcggatggatgatctatttttattccataagttgcattagagtatgagactgagggtaaagatgaagagaaattattctcttttgtaatatttctgagattactactattatcttgagtatttatatcaaattcaggtgtttctgttaaggcagaaatattccaaattttgtcctcactatttgccaatgataaaactgatatgaggataataaaaaatgaaattgaaacagaaatagacattgataatgttgaatatttaacgaacaagttattctgatttaaatggaatactatttaagctctttaatgatggtcgtccttacaaaaatattgatttcagaccagaataatgcggataattaatagacaatccactttcttacttgattttaaaaatattgaatacgaaagtaagtgtcggtatcacatcttaccatcttttctctattctatgttaagaatgaatttcctaaaaattaggatgatggtgtatttgttgtactgccggttgtagcatttgctgtaagtactatgatgtcaccaaatgtctgccctctgtcatcacttattctcaataatggcgtgtctgtcccatcagagcctttatcccaccaagtaacgtataccttatcatctaatgcagctatctctgtacgttctgacacaattccttttgattcactcaaattgatatctttaccaaaggtttttccactatcgttagatactcttatgaatacatctggttgataagtagtatcatttttatcgcctcctgttgcaattacatagacattgtctccctgagcatcaaccttgagttcatatggagatgttttgacattatcatacgacttcatcccttgagaaacagatgaagatgcaagattggaatcagaattgttagtcagttttagttcaggcccaaaagtttttccagcatcattggaggtcctaatataagcatcggcatctcctgtcttgttatctgcgtaagtaacgtatacattattaccaaaagcagctacgtctgcttccactgaagttccatttgtagaattacttaggctaatcttatcgccaaaagtctgaccaccatcattagaggccttgaacattacttcataatttccgctttgatttccccaccaagcaacataggcattgttatcagaaacggctataggggccttcccgtcgcttctgtcaatacaaggccaagagaaggcatgtgcggattggaggggtactgcggttaccgcagtgattattgttacaaagcatagcgataaaattatttttatctctaatttatttttcatcaataattctatatgggggtattataaaaacaaatattgataataaaattatatgaaaatcaatatttttgtttaaaataaaaaaattaatgagaacaggtctagtaattttgaattatggaattgctttgtcatattctagtcagtagatagtttaaaccctcaaattaatagaatggaattcagatccatgaatttagcttaaccatgatgatccctcaagtaatttaattaattatagtcttaagcgaaatttaagtcgttgacgacttggaaatgtagggcggatttcctcaagaaaagtgatgttattattatgctaaaggataaattgacaactttatggtccaatcaatcaaatagtttttcaggactcaataatgatgagaattatcagccatggtgatatctatcgatactaaggacaaatgaaatggaaattattttctatcatgaaaaaaggttgatattgaatgatcctataatagttcctaaaaggcaagacatctagctgactctaaaataaattttgtcaacataatcaaatacgacaatcaagaaatttaataactacaacaaatacctgtcgagaattcaaagagtctaagttagatgatgatgatgatgtaagaaaaggagtcttatctctttcttaccttattgttactgacgtattcaaaaatgttcctacaatttcagtgaagatttcgggatactgatacatcaatccatgtcctgcgtcctcgatttgcacaagccatgatccgggaattttatctacgagaatcagtgagtttccggagggaatcgctttatcttcagtgcctgttatgattaaacttggtttagtaacattttgaagtaaatcgcaaactccagaccaattagttgaaagccaaccttcatttatctcaaactgtttttttactgtagaggaaaggatagtttcagaggtctttggaatcaattctaaaaagtttggattttctttaatccatttaggtgggaaggtaacttcaaggaatgcagaggcatctttcgtgtgattattaacaaaatctgataatatactaattattttgggatcttgagggatcccttcttgccctccgcatgatgatccatataatattaatctgtttaccttttctgggtacgtaataaccaactgttgagcaacaaaagaacccatggagaatccaagcacgtcagctttttgtattcctaaaactttcattagacccagagtatcgtttgcaaattgtttaactgagaaaggttttgttccctctgtagtatttccaacgcctcgattatcaaaaatagttaccttatgatctttcgccaatactttcagaaaatatgggggccagccgtccattacattcccgctgccactaatgagtaggattggttctccccttccaaaagtcttatatgcaatttctatgtctcctacgatgaccttttttaggtcggcttgattaacagaaacggactcaaaattagtgtcaggcgacgttaattcattcttattaatagatcctacctgactagtagctgatatcgaatttgataattgtaatctttgatcaatgacaaagccgaccaatccaactaccattataactgtgactgcaagcacgatttggtcaaagaaggatgatttccttttcactaaacttatttgttttatcctgcgtataataagattgatcgttcaattttacgacgacagaatgatataggtttttttgataaaactaaactaaaagtttcaaatcttgaatttgttacaagtcttatcattctgttcagtcacaaagtacaagcgtggtcagatagtccttgacagatattatacatataaaaggacggtttccagtttgaaataatgaaaaacccacattgatagaaatatctaattcttaagcactaatgtcttcaatttttctaaggtttaattagaaaacataccaaacatgaaggtagaatacaaacatgcttcttattcacataatctgttacgttgatagatttttttcataaaattagacgtttagactaggcaatgaatttttcattttttgatgcgtcgttatatgatttacaattgtggcattgtaatatcatattgcgatattagtaaatccgctgaaacaaatccacaacagccacaggcgtgggtttccagttcaacccctttgactaatgcatctttatcatcagtactaaaaatcattcttttctctacgttagatggtgacataacttgaaggttaattattttagtcatatgacatttatttgcattattggatttaatgtataggattttttactatgaaaaatcgctgaacaattctactctaataatgaagtttctattaaacagatatctgtttcataaagtctacacaagtgtacaggatatttcatttgtttgacaaaaagacattttcaacatttcataataaagagttaggaaattcaataatctattgaaaatattcaatatgttatctcgtgtgtaatctaaatgtggatgcaatctctaaaaaggttttaatttctttcatttgaaatactccagttctttccgttgcatattgtcttttgacacaactgattagtcaaaatctaaggctcttttaacaatccagtaaaatgtaataacagtgacaattcttattaagaacaagaatatttcataaatgatgataaaaggattaggtttgatgataatgccttttttgttcctgatggtcggaatttctgctataacgttcatgtttattcctatcataagcacattttctctgatgaacggaaaccaaaatagtaataatacaaatcaatcacaattatccgttactaccaactttacattattgaaacagctggatctctttactcttacccaacgtttgaataatacgatatcagatctgatggcagttggagatgcctcgatgaatggatctaattcttttggaaacttacctctggtaaatgttacgagtgaaatgaaactgaagtatcatgggataccaagcaaccaagacctagagaagagaaatgaagctaaaaaactattggctactaacaaggctttattatatgtgggattacttttaccaaatggagatcgctattttggtgaaccatattcaccatatcaaactaatagttctacaaccaactttgcgtatagggaccattttattggcgccgtggaaacaaatcatccatacttaagtgatgcaataaatgcagtctctacaggcgaaccactttcaatactcgctaacccaatttattcagatgcgaaaaataacaattcattgataggggtacaagtgttaggtttaaactttacctacttcaatgatctgataaaatcaacaatgccgccagaggatagtgataagaggtttgtgatagtggataataacggtacagaaatagctgatacgtcatctgacaacaataacatagaatcatttaaggaacttcaaagctttcaaaatgcaaaaaatggtgaatcaggatcattgatagagaaagtaaatggcaaaaatatgtacatctcttttactccgataaaatttgctcaaacggactgggttgtaatgttattgtcgtcgaatggttgactcataattatgtgatactagtatgatgggtaaagacataattcttaaccctccaatagacttcatattatcccacttcgaaagttctttgggccaatttccacgcaaaatgatgacctttagatcaaatggacagtttacagttaatacaaaacaagaaatcttgaaacgatgtgaacaatctgactttaaagattgtcgccttaacgcatatcctgaaactatagtaaaggatgatatactaattcaatcgccaaactttgttttcgttgacttggatcttggcaattttgataatgacattcacaaattgaataaagtaaagaatagtaccttgagaaaaatggaacaaatacagggtgcgcatccaacagtttcttggactgggaatggttttcatatttatttgcctatagacatcccagtcctggacaatgagtatgttttttctaaagataagtttccaagtctattttctttaaagggaaaatattcacagtattttgtatctgaagcctttatgcaatttgcagaagcctatttcacaagtggaagagctgatcccaaccatcgacctaaatacaaaacatgtttagttagaattccgggtacttttaattccagatgtctgggtagaggattaagctttgaggagtccaaaataagaatccttcaaaaatggaatgggaaaagaattaacggggaggctatcacacacgaatttatgacatggttgacaaagcaggaaattaattttaacaagtcatattctaataggcccaatcctcctaaaaaaaataaaacaaaataccctggcagtggagagagtcatcatcaaaataagtccagttccagaattgaatggattgaacgccttttaaaaatgcccatagaagatcaaagaaaatactgcttgtggcgaattattggtccatacctactaaatgttaaacatatttcagaaccagagactgcgaaaacgatggaaaaatggttagatctatgtagtaatctaaagaaattagactttgaacccaaaattaagatatatagcataattaaaggcaataagggattcaaacctatttcttactctaaacttaaggatgaaaatagggaactttgtttattcctacaaaaaaagaatttcgaaaatatttccaaatagattttttactttatactttgttaaagtattgattggaattaattaatttatagaatgattctaacccgattatgatacttgttgtaataacattcaaatctcagctgggtttggcaagctgttcgggaaaattgaatgtaattatgtgtctaccgatcaggatcctgatattccatcataaaaaataaagactatactcacaattatggtaaacataatgatatgatgttgtttattggaaggaattgatttattcttaatcgaatgtcatcttgtgattatagataatcataacataattagatcataattgaaactgtatctattcggtactaagacatatgctgacaataatatttgaacgttcttgtctaggccttatgatttagacagaatgatacaggcggtataatgtccataatactagaccctatcaaaattatcaacacatgttggactaaaaacatcataattgcaacgacaattaaatagtttccattaccaatatacttttgatcccttaattatttttatattatcattatttaacgatcttatgagtaatttggataattctacaaatcaaaaagattctcgaggtcaggtagctgttttcttataccgctctccaaagaaaaaccatgatgctttagtaaagattaacaagcactcccatgatttttttaagaaacacggagtattaaaatttgaagtctttaacctcaattcaagagagaacatgatggattttgtaaatttatcaaagaccatttctgctaacgatgatgaggatgtttggctagaaatccagtcttataaggatgcaaaacatgtgcagcagtttatgaaggcaatggaaggtgatagaagtggggatgaaatgtataaggaatttatggaacttattactccaggttcaatagttacttttggggattttagtaagttagaacaaatatcttagatatccaacctatcgtcgataatcactgctgaaaagcccgaaatattcctacattaaggactgacttatggagtatttttgaaattcttgatctctattgtatcaaaatcggtccaaatattgtaacctgtaataacaaatacttgaaagtgtagatgtggaatataagtataaccggtcattccaactttggatatcttgtcaccggcttgaaccttctgatttaatttgattctggaactcttataatcaaggtggtcatatctagaaaattctccatttgaatgactgattatgataaaattagtatataaccaatatgatgcatcgggtcctccaacattggagtcctcattgatataagttactataccatctgctgcagcaagaacagatgtacctataggagcaacaaaatccaccgcatttcgaagcttaccgacatgggcaggagaagatgatctatccattctttgcaacatttctctaggaacagggattgtgtaaatgttttttgccatcatctatgaaaaaaacccacttcatagtaataataattcaaagaagtatataaaactcactttttattaaaattttgaagtcagaaatcaccatttattgcaaaatgattatttgtatcatgattaaatttgcaccggctgcagtcatcaataaacacggctttaaattccactttttaagtatttgagattaaaggtctcatttttttcagtgtagcaagtacataaataagcaaaacaaattaagacatagtatgtagtcaaatagtcgattgccattgagaaatagtttatgttagaattaaaaatgtggttttgatcacctgaacaaaacaatatcccaaactattgttttgatatagtatttgataattagaacagaagataatgagacctttaacaagtcgtccaatcttaacttaatgagtgaatagcctactgattttaatttcatgtttgggcgtaatcaattaaactaaatatgattattgtagccatgaaactgtaggttatgaatactagcatcattttattcacaattcacagaatgtttctgatttgttagcaaatgtattacctgtaatattcaattttgatggtatttaacaataaacaaaaaagcgaatttttgataactgacttccatgaatgactatgaatgttgaaataattcatcattgcttagatagttattaattcaaaaaggatatctcaaacttttgaaattcatcatcacatgtgtatttcggaatggttaattatttcgatactttccaagggatgtaaatcttcttgcacatgtagataacaataatattttgaacacatctcacacctagctattgcttcacccagacaatcattttttgaacaattgaatatagtttctaaaggttttgtcttactttgtattggattttctgaaatactatggaatgaatttttatcccccatggacatttcaatcatgactttgacgtaaaagataaataaaacattttccctgtgttaggaaagcagatttgtatcccttatgttataaaaaaccacattttaggtttttcataataggtgtatgatcttgacttcatgttccaaaaggaaaaaaagtttagtaacggttcaaacactctagttaaccccatataggcatcccgttctcatgctttacgctagttattgaccacccctttgcaatatttcggttcatttgtcacaatacacatgctgaatttgaggtaaatcatctataacttaatcaatacatagccatcgcacaggtaattacgcgcctcatttaccattattggacatatatcttgacaataccaatgaatatttagaagagaatccaccataatgtggttaaaaaaacattcacaattattatacctcaaaaaagatggaatatcctaaaattcttgatcactctagttttttgaatgcattagcggtttacaaactatggaataagacacttctttacgacgttttaaaatattattatatttaattctcatattttgcactccgaatgtgtaatagttgctttggtattcacaaacttggcacatcaatttttcgagaacaaatggtattttctgagaataggccgtttatcgacaagggaagcagttaataaccaatattaaatttatgtggaaataaattcagctgctataatgtgcttacattttacatgcctgtaaataaaatcattacaagtacaactctgttcttccaagttcacgagataatttttttctttatccatagaactctttaccttgtaaattttcctactagattctaaggaattattatcgagatttgagtcatccttatcttttttgactattgtattgagatcctcttcaactattagagatgcttcattaagagtagactctataatatcatatgctctatgaattctattctcatgattttcttttttaacgatctctctcttagctgtcttcttcgacctttttatggtcttatttgatagtggtgtatttgatagttttctctggggtaacagagaagcagtagatgttgttattatagttggtgcttctgtttttacctccaacccctttgatatggctttaagatcttgtttcttgattttaatctcttcattttcaactgttactgctttatttactactctaatcacatggtcatcttttgtatcgggaacgtatacgacatatattaacgcaatattcttgccctcatattttcgaagcactcggcctattctttggactatttggtttatattagaggtggtagccaagataatttctatcctgacttgaggaacatcataaccgatttccaaagtatgcacagataaaaggacgttaaaagtagtaccccaggaatttagaatccttttccggtctattgctcttaccttagcgtcaataattttcgattctattcctccacctttcaaaatatccctcaacttttcaatggattctattgtctcactaaataccataattttttcatccggaaatttattttgaattatattcgctgccgcggttaatttattatcagcatagcttaacaacaactttctttttcgaatgtttgcaaaccaagctttcgccattccacttgcaaatccaccttttttcaaaagattggtcattgaactgacatcatatcttttgaatttatttgaaatattctttatctttgtagaatatacattgtattcttttatttcactttctgtcagagagacttttatgggaattactatgggtttggctagtcttttatctttaactgcctttttaatggaatatctttttacaggtggtaatactgcaagtatagtactgtttttaaaatccttctcatccaaggtggctgtgagacctaaaattgccttttttggatcttcaattacaatatcaaaaattttaatgaacgatgttgaagtgtctcttatcaaatgcacttcatcaaatatcaccatattagaacgtcgaaccagtaatggatttcgtattacactatggtaagtgcatatcattatctcccttttttctttgcgttctccaaaataaaccccaactttctcttttggtatgccatatgaaactaatctatttagagtttgatctattaatgatattcgcggtaccaaaaataaaatattgaaaaatgaaaaagaaagtgtatttttttctatattgggctttacagtagtttcaatctgtttatgaaaagaagtggtatttttttcgtcatttagtatcaaatccgcagagaacatttcatccattttcgatggagattttatcctttttggtgaaagaagttgacccactagcctccttgcacattcgaatgcgatttcagtttttccagttcctgtactgtagaggatagttcccctgttgttgttttccatccatgcatctactgcggctatctgatcatcctttaaatcgaaaggaaattttaacgacaaaatagaaggtgaaagagtttgtgtagatagtgagattatcgtatttattttcgatttctcttcaatgatttctgaatcctttataatgtgattaggtctaggcttcattgctaaaaaagcgtagtatatcatggtttactgaagagatcattatcttattttgccacttattattgcaataaattgattaatatacttttacgacaataaaaaaatcctcattaaaaaataaggatagtttaggggcgggcaatggcccattttatgtgcctggaaaggtaggataagtctagaaatggtaggatcatttaatactatgtttaagaacatggatgctggccacctgggaacagtgtattacaatttgaataacgcgcctagtagaactaatagaagattggagatgatacaaaggttttattcttaggattctttgtttgtttgataaatactataatgaacagattgtattataaaatttataggatattggagcttctcaagagcaacactctattcaggatttatgtagatttgcccgcgaagccgaaaaaggtagatttactgctaccataacaagtgatcacttttatccttggtatcatgataacttttattggaaactgtcattaactttttactatgatttcatttctttttaatttctttttatttcattgcttggttaaccataccttaaactcttgtattagcgggttaatatcaattatatttccatcccattcttggaggattttaactcgtgattcttctaaactcattcctttacttaaacaaaccatattataagtatcaggaattctgaccatacagtttgaatatctgggttgttgtgaaagatcagactttccgtccgtcaaatatttctctgcaaattgcaaaaatacttctgacacatagtattcatagtatcgaccattcaatgaaaatagattctgaaatcttcctttagaaaattcacattcggtatccagaattggaacctgtaccggtaaataaatatgatatccattaccagtccacaacacggtaggtaggccctggattttttcttttatttgtattaaagtttgttttaagagataatcgagtttcctgattgggtaaatgcatgttttgcaaagggaaagatccaaatctatgagaataaaattgggtgattggataagccttccgttaatttctaaaatttcaggataggcatttatcacacattctctataatccgcttctctacatctttgtaatatctcctcttttgagtttattgagataagatctttcgaagtcaaagtcatcattttgcgtggaaatataccagtgggacttttgaaatgggataaaataaaatcaacggagtctatctttatggtttgtcgcctccaacccctatattttaaagagtaattactaataaaaatacattggtagagtaatatcctattcaactatattagttcttattcaagccaataaattatttcattctcgaattctcgtcccaataacagaacttaattgacaaaaaattgttaatttcagaatggggactaaatggaaaacaacttttagagtaattctataaccaagtctacatctttagttttaaacctcaatcaaacgtagtagaaaataatgaagatcttgatcagagaatagaattcgttttctattattgtttctatctttcgctcacaagagcatcaaaccctcaaatccatgaaaaattggcatgattcatttgccaactagtaggctataaaggaacataatttattgaactcctacaagaggatagatttccgcaagatcgaacaaatctttttaattgaaatgcgcctggcctagattttacatcttttatagttcatattcatctgaaaattatctacaggataacagctatgaaaatatctaaatattatcatatgctattattctgtctaaaataagaatatggtataaatactattttaggtatactaaatctacattaactttgatacggataagattttcgtaggaattggatgtaaaagatggaatgcaatgtgttctgctacctgctcccatcgcatcccatttctatgttttaggttctaaatattttatcaacctgtagcttacaaatttaaacacaaatatatcaaaactaatcattttctatcatactttccaccctattttcttttcatggtctgaagctcaaaaaaagaattttgattttgcaaagataaaagagatgaatttagtgatttttatagctatttctgccacttcaattttatgacttttttgaacatttatatatttattcagggatcacaattcacagttactctccttgagattgatttatgagataacgataacgatagtccgtttgctactccgtaaaagtaagccaattttttagatcgatatcaagagatattaaaataacgcatttaaaaactaccatatatgaccttgttaggtacaactcaaatatcttgctcaactagaataaatgtttagaaaattgtttttttatattttgttaccataaaaatatctctttatgtaggttattccaccagatataacacccacactcaagattccaattgaaattgctataggcgtaataaaagaattcatatttcgatattctgttgaccgatatttccttctgtaaatactgacaaaattccagaaccagccagtcctgcaaaaatcatgaggatggttactagaggacctctcaatattcattcccaataggtgtatccaagctaaaatattcacaaaacctgagatcttttttgcaagattgatctccaattgaatataaaacaccgcggtaactgcgatggcaacgataaatattagataaaatattatttcaagaaaggaccatttagcagggctatcaaaagataatgatagaaattggatcatgtctattttactagaagtggtgaattgagatcccaccatcaaaaaggctattaaagtaaatagaccacccggacaatggctgagagaataaaacgattgcccattttgctttactcacatcattaatcatactacattacagcatctctcacttattatgggttgataggaaattcaacgataaatcggaatgaaaggaacatgatttaagcaaaaacacaaattcaaaccttacagcatggtaattgaaattcatgcaaaagacttccatttgttatgaacgtacatatccttacgcaaaaagcaactggttactttattcttatgtaagttcctatgcaccattcatttacattgggctagtatctcaatagatatacacatgattttcaatgctatagatttttttctcaattaagggaaaccatacaactagatatgatcatcagatttcatgatcaaatactgcaaaaaatagattttcctacaaaatcacaactaattggaaatattaagaactctaacgaaggaattgttttaggacgatatattataaagatgggagatcgccgaccggccgatcgacatactcattctctaaactaattctaaaataaaatattgtaatcaattcccaagcagtttctaacagtgaaataatattaataacataagtacgattgtattagagattatttgatgcatgtcaatgtgaggaatttgagagaagatgaccttgaagaagcagacaccatactcaggctctcatttggtacctttatgggtctaaatgatcccatgtccttttttggcgacgcagattatattagatcaagatatgctacagatccaaactctgcatttgcaatagaagttgatgggaacctagccggttcaaattttgttacaaactggggtagtgttgggttctttggtcccctatcaatccatccgaactattggaacaaaggaatagctaaacatttgattatccctgtgttacaacgcttatcaaaattggaaatccagtacgctggattgtttacgtttgctcaaagtccaaaacatatctatttatatcaaaaatatgatttttggccaagattcctcacatctataatgactaaatcaattactgatgaaaataacgagaaaagattggaattatctcagaatcatgaatcgcagcatgcagtcagatattctgaaatacaaaatgacgtaaagtcattaattttagacgactgcaaatatcttaccaacggtatttttccaggactagatttgcaaaaagaaatattggctgtagacagtcaaaaattaggtgacacaatattgctttatgatccttctggaagcaagctaattggaattgcaatatgtcactacggcaagggtacggaggcaggcagcaatgtttgttatatcaagtttgcggctatatcaacaaatagtaactcgcactcaaattttattcgaatgttgaatgctgtagaattaatggcattagaaaaaggcgtatttaaaattactgcgggtagtaacatggaacgacacgtggcatacaaagcaatgatcaactatggcttcaaatcagagttccaaggagtatccatgcacaaaggaaacaaacaaggatacaacattccttccgcttatataattgatgattggcgttaagggtcgataccaggcctaggatgtgaattgatgtataaacatttagatttcaatttagcacatccatatcatcatatcatccatctgacttgacttagatttttctttcagtttcataaagggacaaagatcaagacttaaacctttacctttaggtaattgtctcaaccctcgttgtattataacgggttaatacttggtcttgaataattccaatcaatgatgaccatctggaaacgatcaccttaatttatcaattattataatcaacctgtttattacgaatctacgctggtgaaaaacggtagatatagtgccataatattaaggaaaaaatggtcaagtgtaagcccttaaattacgaaattctttttctataaatagtttttattcctatatattttagaacacttattgcgtctttcgttcaaaagagtatataatttgcatagagtcctgtaagtatcacacaatcttctatttcaatggaatttatcaatggtaggtaaaacttacatatctccaagtaacacatcatagaattgaataaatctattgtacatgttgttcctcacagtcattatgatgctatttggattttcagcaaggaagaaaatttcgatattaattgtaactttattataaaaaaggctgttgaaattttaaaaaacgaaaaagatttcaaatttattattgaacagacttatctcttagaaaatattgagacaagttatccagaactattttcagaaattaaacagtttatcaaagatgggcgaatagaaattgcaggaggagaataccttatgtcagatgtaatgcttccatcaggcgaagtattaatcagagaaattctagaaggtaaaaattatgtaaaggagaaatttgggaagaatattttagttgcatggggtgcagatgaattcggttacaatgcacaatggccacaaattctaaaaggaaccggttataaatacttcgcctttagaaggggagtaacagagccactaatatctgaattttattggaaaggcattgacggtacatctatactatcccactggatgcccctaggttatcgagcaggattagatctgtcacttttacatgaaacgttcgaacaacttagaagacaatcatctacgagacatgttcttatgccttcaggcagtggttccacacccccacaaccagagttatgcgatactatcaacaagtataatgaatccgccaaaaacatcattgaaaatccattaatgaaggtgtcaactccttcagaattctttgaagcgttagaaaaagaaattgaagagaaaaatatccacatgtctatcaaaaaaggggagatgtactcaggaaaagcttcattcgtattcccagacagtacttcaacaagatcatggatcaaacagggatttaaagaatttgaaacctacttacttatgcttgaaagatggaatacaatacttcatttgatatcaaaagaaaatgatcatacagatgatcttaaaaagtactggaagcaagcactattttttgcaatgcatgactctttacctggtaccggtattgatgcagtgtacgatgagatgagatcggcatttgataaattagagaatacattaaaaaaatcacactttgaatgtattaataaaatatctaaaatattatttagacaggacaatgaagcacatcatatcttagtgttcaattctgtgtcatgggacacaaaggaatgggtagaagcaaaaatcaactttgatattgacgaggcgattgaaataatggaacttagaactgtaaatagtaacgaaatagtggatgtagaaatactagatttagaattacatgaaaaagatcgaggaattaaaagtgtccaattagggttcattgcaagaataccatctctcggtttttctgcatatgaaataatattcaggaaaaaagaaaaaggcaagaataacaatatggatcaatcacccctactagcatatccaagatcctatgaaacaaaattcacctttgacgatttcacattagaaattgatgctgaaaccggtatatttacactaatgaaggctgatcgtctatatttcattggcaatgaagtacgtatagaagaagaactaggtgacttgtattaccataaagatgtaaccggcataataaagtcagaaagtggtgaaggtataccatttggagtattcaagaaagaaaaatacagtgttttgaatggtaagatcagaactaaaatagtgtttcagaataaatactatgctatccgttggccctatcgacttaatgaaaaattaccgacaattatttaccagcatagtttcttgacagtaaggaaagagatatccatttacaaggggttgtctagaatagattgcacaacatacattgaaaataatcatccccatgtgcgaattagggttaagtttgatgtaccatttaaaggatacacttattggaccggtacacaatttggtgctattcaaaggccaactaatttattttacttaaacaaagatcccgatgtacttaagaaatggaaagaaatacccagtggtacatttccttcagtagagtggatagacttttccaacaaagaacaagatatgggtgttacactagcccattttggtataccttcccatgaaattagagacaatagtatatacctcacattattaagaggagttgagacactttctggagatgggaccaagggtccttgtatcgccactccggatgcagcagaaaagagaccatatatcttcaaatattcgttgctccctcatgacggagattggcgcgatgcatctagctataaagaagggatatcttttaacatgaaaccaatagcaattcacatttcaaacaaagaacatcaaaaatgggatgacaatacaagtgagtcgagttctgctggcaccacggttgatgtaatcaaatctaatggtttttcatttttgtccatatcaccaaagaatgtgatcttaagtacgctcaaactcccacaagattttagtcataatagcaactctaaagtagtaatattacggttatatgaaactgaaggtaaaacagtcactgcagacataaaattccattaccccataaattctgtatcatatgtgaacttgattgaggatgataagagcaagacagatgatgacagtcatgatgatgatagtgcgattacgatttcgggtccaagcaaaaacattcttagctttcctattcagggttttaagataataactttaagaatagaattcgatttttagaaccaattacaaacatacgatgaatacacatgttccaaattttaccatgcaatgtgatccttctcaataagcactaaaacatagaaacgagtaaaaataatctcgatcatttgattatcgatcctgtcaatcatatcacattgaaaatataaatcaatttaaagtttatgaccttgtagttgccttaataaaatgacttggtagaaccgaatccacaactctaaccattagatattgagattcgtgttgaaacttcattagaaatcgacatcggttgtttaatagctatggcaattaggatcatagatatatatctgtctttttatctagaaaataaacatatatgaaattactaactttggctccaatcttccttctgattggcattgcagtctttgctcagtcagaagcaaacgcccaaggaggagaatttacacttacaattaacccaggtgcgactgatagtaatagtctaaacccgatagaaccagctaacattacaataccagtcgggactactgttgcctggctcaacaaggattccgcttatcatcaaatagtatctggaacccctgaggcgggtccaacaaatgtcttttatggagatttttttgctacaaatgaggcatataataggacttttgactcagcaggtgtaatcgactattacgatccaatatggacaaatattaggggccaggttacaattgtggatgagaacaatacagagtcaggatttgggacaacaggaaattttaccaataataatttcacaagtaacggtgcaaatacaggaaatgggacatccctgactaacgacactttgcaatcatcgacaggcgagacattccaatccaataatgtcaacactcccgatgcaggcaattcgaatcaaccacaaacaggagtagtgggagataatacccagttatttactactgatcaacagcaacagcaacagcctttgcaatcatcgacaggcgagacattccaatccaataatgtcaacactcccgatgcaggcaattcgaatcaaccacaaacaggagtagtgggagataatacccagttatttactactgatcaacagcaacagcaaccagttcaacaacagcaaccagttcagcaacagcaaccagttcaacaattcacacaaaaccagcttcaaataccacaacatggtccgatcgatagttttaaagcaaatggaaaaatcaattcatacattgtaacggcattaagtccctggaatgcaactggagattggaatatggtagttgaagatggtgaaatgaagaattttgtcaccaacatggcatggtttaatggtacttctggtcatacacatgattttttgaattttgaatcaagtggcgatatagaactacccgctgataacatattgacaataaatggagaaatggatgtagcttctaatggagtcattacttgggatggcgttgattcaacaatcaatatcggaggtggaggtaaaactataactatatcagtagatcacgaagataccgatcaccattttgctggacaaccaattgtcggaacagtaacttcattgaccccctgctcagatacgcctggagctagtatggaaatattacccacatgtgattagaactcaaaatgacagcacaaaaataaaggcaaagatataataccatctaagaatatttcttctttttttgaagagtctttgaaaataaatatcaaattcgatttggccgaaataggaataaactaactaaattgaggaaataaaaagaaatgtatggagaagcaaaaggagacaaaatctttcaaggaaatataatcaaaagttattgattacttgactcatgagctgagaacacttcctcaacaagtattataacactccagagtatccaacctaaaaattttgcattcagttaaccaagataataagtatgattgaatgattgatggataatgccgatggttggactataagtggggtaggacatacacaggataagaatgacgataaaatccaactatcctggattatccaactaaggatcataaagaagatactcttgttatagtttgtctggtttcttataatcgatattcaaggggttcaccgatttttgatagaagtatgatattctttaagatgttcttctagccgtcctgacaacaacctccgcagtcacacagttgttccccgtaattttcacatgtatcatttaattccatatagttattgtaagcaacttatatatattacttactgatttcggcatttattggttaaaaatcgactaatacgtattagtatagcgaaaatcatattttctacaaacaaaatgacgtttttattcaaaattatgaaatcaactgtaataaaagatatctatatttgtgtggataattatgaaaataatcaccatttacttatattttattgattaaaatgcttcaaacgactaacaaatatcattataatcattgtttttttatattactttatcacttcaatagttgtgtattagaatggaagtggcaaaccacgactggacaaatcaattcaattctatgtcggtatgtactttccctgattgcaggaacgagtcaagatgtttatgttcaaaatgtctaaccctttattgcaacttgcacttgcaaattcatttggcaaagtgtaatagcataggagaaccctcttggaacagcgagagaattgaacaccatcaaattaaaaacggaatatcatgtgatccaagtagtacatgcctaattggataataaaaatagagatttctggatactaaataaattattaatttcttttgtttttttttttgtttgaacttattgcagtaattagctcgatgtgaggatacgatggattatagtaagttagatttgaagatattatgacagcattattgacatactcctagtaattccacgcatccatcaatttgataaaaatattgtatagcagatattaagaataaattgaaacagtcaattacaataggattaaggaatggcagaaagttgaatgtagaattactatctattttttattgcttctatctgtccattattagcttttacaactacttttttaaattcagaatcgcccccatcaggagatacgaagattgatgcaaatggccccatatttcctaaaggttgaatttgatcgtcgtcaaactggacagtaacgttattgatggaattgaaattattgttgcttaattttacgcttattgtctcgacaggaccacccctttgaattatttcgatatttaaccctgctgttgaaaaatatacgaacaagacaactgctgcaaccacaacaaaaccaacaaagattattctgcgaattaatttatagaaatttcgctttttgcctgatctaccattttcaggcgatctaccattttcaggcgatccttcatcatcccaacgccccatatcttattgatagatatttttcatgcaattaagtgttatatactaaaatgatctagattccaacaaacatctttttgattcgataatagggttttgcctttcacatgttgatatcacctattcgtttatgaatcatgcggactaaagtaaagcagtaaaacactatttctaactaactagacaattagtctatttgggatacgtatggttaaaccattcgtataaatgtacaagttttaaacttttatctacattgattttttgatctcattcgtttagagaatctcttgatccaaactcattcttaaatccatatagacttgccagccttttcacatcattgttagttattttacaagactggtgggcaagctttagactataaggatatcccttgatgctatgatagcacaagccatcgatcaaattttgaatttcgggttgtgtaatatttgccctattaataatttcaatctttattaggggaacataggccgttagccttgcatatatctcaactacatctaaattattagagataaagttattcttgtttgcaagactaaatcccgtcttgtaacccaatttattataataataaatatcagctgctcgtgatccatattccttgaactggttctttgatgtagaattttttgaaataaacaaaatatcactctcttcatcagtagcaaagaggccctgaacgttttccctataagatacatttttgttatgaactaaattagatattaaggatccatcgacacaaacataatcgggtttttgatccaatacagatttagttagatcgatttccattttcatagctttagaactcagagcatcaccagtaatgttagaaatcccataatcccattttgatcccaaaacgtgattatgtgagcttacagcagcactatcaataacaaacagatcaattccttgaaaggatttcttattccagctactatcaatgcccacactaaaggatggtttttttgtaggctcatattccacccactttgtagatgcaatctttaagagatcgtcaaattcatctccatgtatagatgaaagctttttctccttattttttatagcatccaaataaagttcggacagcaatattatagccaactcaagcactaaatttatttattattcatcacaaacaaaccataaatcaaaaggttagtattatttaccttttagtgcaagggaatgcaaggtaaatcataatttaactacggagaaggatctaagggattcggggttttcgactaacaaaaggtcatcttttgcgatgtcaatatctaagagtttcttacgcatcaatcttcgtaatatcttccccgaccgattcttcggtagttcattaacaaaataaatggctttaggaagtagaaatttaccaatcctttttgtcaggagtttttcaagatctttttttattaaggatcttgtctggttcgtcatattagcattcctcaaaacacagaaaatacatacagattcaccggttaactcgtctggaatgccaacagcagctgactcaacgattcccgaatagcttgttaatacctcttcaatttcactaggatcaatcctgtgtccagaaattttcatgacatcatctattctgccagagatataccacatgttttgtgagtcagtccgaaccttatcaccatgattccaaatattaggaaattttgaccaatatgtatgtaggtatctttcctcatcatttagtatgcctttggtcatcccaggccacggattcctaattacgagatatccgtcatcaacggatttaccttggtcatctaagatatcaacatccaatcccggtacaggcacacctacagatgtaggtacattgtccaagaatggaagcatacttagaatcgcgccacctacctcagtgccacctgacaaatttataacaggacaacgattgttccctatttttgaaaaataccaattccacgcttccttattcaatctctctccggtggaaaccagtagcctaagagaagaaaagtgaaacttggaaaaatcaatcttatttcgcataaattgtctaattgccgttggagcagccccaaatattgtaacatgcagatcatcaacttgctttgcccaataatccatagatggaaagtccaatgtatcttctaatatgacagcagttgaccctattatgggagatccataaactatccatgtttgaccagtaatccaccctatgtcagcataccaaagaatagtatcatcagatttgagatctatcaaatatgatgattgatgagcagaaaaaatagaaaatcctccgtgtgtttgaattgtaccctttggttttccagtcgttcctgaagtgtataaaatgaacaaaggatcaccagattccatcagctctacttcgaatttcttgtttgaatcatgtttcctaaatgccttatcataaattcgtttaaaggaaaaaaccctatcattaggaggattataagacatagatccctcagtttctgacacaattattttttttacaaatgtattggataacacatcttcccagtgtgttcttaaattaattactctgcccctccgttgaaaaaaatcactagtaattaaatatgaagaatttgaatcaacgagtctctgttcaagtgctgccttaccaaaaccggaaaaaattggtacatgaaccgctcctaattttgagatcgcatatagcgctacaaatgattccattctcataggaagataaattcctaccacgtcacccttttcaactccgagatctcttagtgcacttgcaaatacatttacccttatttccagctccttaaaactgagcttcttctttatcccatcctggttaacaaagataaatgcagtcttatttgggtgtttattgatattactttgaataacattatcgataatgttacattttcctccgacaaaccactcgcaccaaggtagtcccttttgtacatcaactactttattgaacggctctcgccatttaattccaagatcctcgtttacggccttccaataccattcaacattttctatagatttcagcaacaaatcctccaacgtatcaatattatttttctccataaatcgaattaaattattatcctttgtcaactccgatttagatgaattaattgaatagtaaggtacctttagttttttgaccatctatattttaatcgtttagaatgcttttcagatatattagtctattttatagtgaaattaatcgcctttgatttaagtaataaaattaattgaggggatattgaaagttgaactcattttccctcacttgtgcctcgctacccctattcagtgtataaaaataggttccatttacgtcgtattcgtgtaaggcagaagaatttgaattatttgcatttgcacctaggatttttccttgagaatcaaaaagtgaattagcgtcttcggtcaatgattctctgtcacgaagaacgatactttgatttcctattattgtatacactgattcgagagaatctacaaatccctctgttctggatcctacatctccagaggctatcctcgcattgtcaagataaacattataggtaacagtttcaaggattgcggaccccttatttggattatatactttgaaaacagtttccaacctagattcgttgtttactggtaccactttaaccgaatcgaccgataaagataaattttggctgttgagttgctgaggggttagttctgttgtttctggcgaattagatgacgaaggttgatttgattgggctggtaagtcattcgtaccattgactactgattcaggattattgtttgattgcggattcggggttaaaaaccctatgttaaacaaatagaaaactactccaataattattatacctatcccaactgcatataaaaccctcgttttcataaatatgagaatttatcatttgagcctataaaatggtttagaaaaaattttaagaatgaaaccagataatgttataaattataccaaatgaggtctttaacaaatgaaaaagggaaatgggatgcagaaagttatcacaaagtttcttccatacaagaaacatgggcaatagaactattatctaaaaggaagtggaatggaaatgaggtaataatagatgcaggctgcggaagtggcagggttaccagaatcatcgcaaatattttgaaaaaaggtaaaatctacgctatcgatctggatcaaaacatgatcgcaaaggcaaagataaatctaaaggatcaagaaaatgtgatttttgtcaattcagacttatctacagtagaattaccagaaccagtagacattattttttctaatgcagtaatacattggatcaaaaatcattacaaactattctgtaacttttggaaactactaaagcaatccggagaaatcttaattcaatgtggtggtaatgggaatctaggtacaatcatacctttgttagatttgacaagagaaagtagtgaattcaagggctattttcttgattgggaagatccatggaattttgccactgctgaagaaacgttttcaataatggaaaggacggggtttaagaagattgaaacaggtctaacaagaaaaatagcaaagttttccagttttgaagaatatagactgtttatgaaaacagtggtaatgaaaccatatttatcgtatttgccttctgatcagatcatggattcttttatggattgtttctttaaacatcaaaaggggaatattaaaggaatttctgacgttattaccgactatgctatagactacacaagactaaacattagtgccatcaagtgaacccatgcgtaggaatacaatcgatggctagaacaatattttctagccatcagagaataagatgaacatagattatttggaagaagaaatcagatatcaaatgaaaatacgcccaatgagtccggttctaaaaatagaaaggtaaatgaaaaataatcaaatggtaaccggattgtcattttgcaaatgacttctaataggtgaaattattttgtctaggtatctggaagttgccgcctttaaatccatgggatgaatcttgtcttgttcataatcatttttaacctcattgtaagagaagtatgacatgttaccgccatatttttggggccgctccaatacaaattccttgaactgatggaaaattacatagttaataatttctaagactgggttgttcgctgaaatcttcgttggacagtaagcttttcttatttttttagaaatctcatcatgagtatcatgaattagtatactactagacggattactcttgctcatcttactaaagatcttttgatcttcatctaatgttccatcgccagattctgtggtggtggcgttagaagtagcactggtagaaacaggctcagatagaccaggtaacaagtgatgatgaacagaaatgggaactttccagtctagttttggaaaaacttctctcaccaacatatggatcttacgttgatcggttcctgcgtgaacaatatccaaatctagggctttgatatccacagattgcatagaaggatagagaagctgggaaaaatcaagtgaatctttctctgttcttcccataattgttaacgatcttaatgttctagcaagtgtaatctgctttgagaaaagtacaaaatttttccaataatcatcagtttcctcataaagctttgtaccatgaataatattaacgccagggcaaaaaaatttgaatgctttttcataataatctgaaatttttgaaattaattcccaatcactatttagtttgttattgatataagtatgccaatcagctagaaacacattcgcctggacgccggctttaagaaaatcgttgatcttaaaacctgtaactataaggctacctaaatgtaatcttccggaaatttccaatcctatataatgtctaggcgttgttttgttttcaaataatgcagcgagttcatttgatgttattatttcttctgttggaggcctctcaattaatcggatcttctcttcaacgtccattacaaaattttaatatagagattattataaattgtttaattcaacatattctattgaacaaggccgaatcaggttctgagtaaagaggttcagctaatcttttaacttgttaacctttatgctgttgagctttcttggaaaaacataagtatcaggttcgagcgtagataaagttgaatcagagactgtagataaaggattttttttattactttcaattgcaaacaatggctcgcaatttaccttaatgaatttcttcctgctgcgatatttcttgtccattctgaaataaagataatattctagcactccttcacgaaccccggtaggacataccaataaattgttaaaattttgcttatttatcaatatttttacgatgaaactaccggttgtaattgttttagctctttcagggtcaacggattttagttttgataattcttcaatagatagtcctctgaaaatagtgtttgcaagggttatcattcttttatcaagtgccgctcgactatgataaatagatggggctaaatccatcatatgtgacataaacttgtaaatcgctctaattgttcctcctattgctaccatttttgtatccggagatctttccaaactcaattgatcatttgaggggatattttcaatcagagatttttccaatcttttgtaattaatatcggaccagggtttgctctcctctataccactattataatttactaattcttcagacagtctcaaaacacccatatccaaacaaatcgtttttaatattctaaaattttgaacatacatcaattctaagctaccgccacctagatcaaagaacaagccattagggatatgcatgtaggattgagcacccaaatatgaaaaaaatccttcttccggtcctgataaaatattaaatagaaacccagtattgtcttctagggtatccactacgaatttctggttaactgcgtcccttactgcactagtagctattggaataactacatctatgttcttttctttcaaatcttttttaaaattatcaagtgctttgattgttcgatcaacatttctatcagatatcatgttgtcattgctatttaattctgaaccgatttgaacataatcctgtttctgatactgttttttgtaatgcccatttttgtaaatatcataagtagaaatttttatggaattataaccaagatctattatagcaagactttcctttttcctagactctatcgactcggcatacaaatatattaaaaattacaaaaaagtagtttatttaattttttgtttataagttatacaaaaaaactatgcataaaagccctagaggaaaacaagaaaatatggagaaaaggtagattgattagcttatcatcggtattgtgaaagcgttaacttttctcctggtttcatatctctttgagtttttatcttctttacagcatcttcgaaatgtttcattgtaacatgtgcctccgttgcatgttttgcagcgtcttcaggattactgtatttttgaagatactcgtgcaacacgagtgaaatcgccgtatttgcaactgcggacatatctgcgccactaaatccatcagttaactcggcaattctctgtaaattgacatcacttgttaatggcttttcctttgcatatatttccaagatctttagccttgtacttatatcgggttttggaacaaaaactatcttgtcgaatctaccaggtcttagcaatgcgctgtcaatcatatctaggcggttggttgcggctattataactacgccatttaactcctgaattccatccatttccgttagtagttgagaaaccattcgttcggtgcccgcattaacaccttccattcctctgataggagcaatggaatctatttcatcaaagaaaacaacacatggtgcggcttgtcttgcacgtcggaaaatttctctgactcctctttcggattcgcctatccattttgacaataattccggtcctttcacgctaatgaaattagcttcagattctgtggcaactgccttggcaagcatcgtttttccggtaccggatggaccatgcatcagaattcctttgggtacagaatgacctagttttgtataaagatctgggtaccttaatggccattccactgcttcctgtagctctcgtttaacatcatctaatccacctatatcattccattcaacatcaggagattccagataaacttccctcatggcagagggcatcacttctttaagagcattttcaaagtcagacattgatataatcaatttttcaagtgtctcgggcgggattttctcatcctccaagttaagttcaggtaacaatcgtctaagacatttcattgcagcctccttacagagatattccaaatctgcaccaacaaaaccatgacttacagatgctattttttcttgatttacatctgattctaaaggcatatttcttgtatgaatttgtaagatttccaatctaccacgcttatcaggaactttgatttcaatctctcggtcaaatcgaccaggtcttcttagagctggatcgatggcatttggtctatttgtggcagcaataactataactttacctcttgcttccaatccatccatcaaagataataactgagatacaactctacgttcaacttctcctgttacttcttctcgctttggagttatagagtctatctcgtcgataaatattatagaaggagccttttccttggtttctttaaatatttcacgcagtcttgcttcagattcaccatagaatttgctcattatttctggaccagagatactgataaagtgtgcattactttcattagccactgcttttgccaacaaggtcttaccggtacctggaggtccatacaacaacactccctttggtgcctctatacccagtttttcaaatatttctggatgtcgtaatggcagttcaatcatttcacgaactttttgaatttcctcttttaggccaccaatatcttcgtatgtaacttgtggtactccacggagagtttctccccgttcagcgatatgaaatacagttttttgagtaactaaaacggcatcaacaccaggacctggggtgacacctatgacttgaaatgtaagtctaccaccaaaatatggcaccatcacattgtcgcctttgattaatggtacactttcaagagcatcagctaaatatcgttcatcaattggaggaatagcttctaatggtgcaactataactttttctgcaggaacagctttaatctttctgacaattacagtgtctcctatagctacacctgcattatttctaaccagaccatcaactcggattatacccttaccttcgtccgaaggataaagaggtaaacattttgcaactgttctacgtttacctttaatttccacgacatcacctgtagatgcgctcaaagcatccatagaatcataatcaattctagcaacaccacggcctacatctcgggtataagcttcaagtacctttaaagaaagagtattactctgagacatgattacacttaatatttaataacatactacttatacacttttgtaaaacaaaccctagcaaaataggtattttatgaaccatagaacgacacatcaacaagacgataaaacttggttgcagaaccaaaaaaatatgggctatgaattgatgaataattaagatcggttaacccgatctcagtctattgttttacgaggccaacaataggtatgtttacaaactctttagataagggcgtttgactgtcgaaattaacaaacaacacgctattgtcgataaccgatatcgacacacctacacccttatagttatttgtttcatcagaaatagttgcattattggactttatttcttgaataacatcaatcttacccgagtatgttacatcttcattctgttgctgaacagaattccccacaaaatttgatagatgatatgatgtcgtattgcctatgtcgttatggttatcagttaattgggtactgaagctggtgttattattatctgtcgcagtatcatttccagagtcaatagacgtagccaagttataatagacaggttcctctataaagctagcattaaagtcctttgaaccattatccttagtaattaaagaccaattaccgaacatagtgtttataataacaccagtatcttgattatattctgaccctgcaactgtcccatttagattagctttgcctgatccggagttaatgttgttagtagatgtagttgtagtcgtcccatcatcgcatgtattttttgttgtactcgtcgttttaccattatcgttagtttgagactgaattgagatattgttattacaattattgttattgtcattattgctagattcaatggttgattgaatgttatcctgagtctgtttcatgaaatcatctaaatttaattgcgcatttacaggagcaatgttaaaagcaagagaggttgaaaccattaggataggaagtacaaggaaaatgaacttatatttacttacatggatgtcaaaattactatgattttgtaacatattaaaactatagattttttcactagacattaataatacatatttcttatatgcaaaatatgatttatgctttactgaataaaagatagggatttatattagtttattttcttatataaaataattataaatgattttagtggtatttgaatccttaggtattttccttgcatataagaatgaatgatcgtttaatgaagcaatcatcaccagatattgataaactcgcgggaattgaatactatacaacagagttcaatggaataggcggcactataaaaaaaaatacggaggattttcatgtacaggaaataataagcaatattttcttaaaacagatctctcctgagcagactacaagcaatattttcccagtttatgaaataagaaaaaaaggaatggattcaagccatgcagttctgactttgagaaaaaaaaccggtcttgatcttaaaatagtgggcataaaagatgcaaaagccactacaattcaatacgctagcagttctgctagaaagttcataaagaatatcgaccttggaaaaataaaattaacactgattggcttctcaagaaaaccaattgaaaagaacaatttggttggaaacacgtttggtataagaattgttgaaccaacgatggacaaattaaacaacatcacacaatttttgtctgatatcaataaattgggtaactattacggattacaaagatttggaagtgaacggttggtgactcatctagttggaaaagccattctcgaaagaaaatttgataaggcgacagagattttattgacttacaccacaaaatatgattcaaaatttagtcgtgaaatcagggaaaaattgagagacatcaaaagtaatccaaacttactacgcgaaatccctcctggaatggatatagagaaaaatctagctcaggcaatattaatgggaaaagactctatttcggccttgagaactatccccattaatattagaaggctattcgtccaagcgttccaggcatatctttttaataagaccttaagtatcgctattagagatgacttttccctcaccgtacctgaagaaaatgatatctgttttgacgtttttgaagatagtttgatctttggaaaaattcgcaaatatgagaaggaaaaatttatggacaataaaatgcagagattgccaattattagattaccaggatattctttccaacctggaaaaaatagatttgacaagatattaaaagaattcatgaaacatgaaaatataactgccaaagatttttttatcaaggaaatgcaggaattaagtgaatcaggcggtttcagacaagcatgttatgtatgtaaaaacttcaaatataaaagagaagataactcattattggttgagttctctgtaccaaaaggatcatacgcaaccgttttgttaagagaattaattaaacctgctaatcctattgagtcaggtttttagaacaatttgtaaatggagttgctgatgtttttgcaatgaacgaggataataaatagaaataattatgaccaggtataaatacataaactagtgagtgtgggataagatttcggccaagaatgatttaccactattcaaagcattcataacaataggaatattagtcatttttttcggattagcatttataattattgatttggttgtaaacgaatttacagaaggtttgagactaataggtagcagattcataatagtaggcatagtaacgatagccatagcttttgtctataaacatcatgtagtaatagggttcatactcagacaatttaaaaatagattgacagatcaggacagattttcaaaatggtacaagccataagtaaaatatatactctaactactatctgcttgtaaattatccgcaagttagtactacgcatgatggatgaattcaaattaagatatagggcaaaccaaaagttaaaaagaaaaattctaacaagttgatttagctagttgacaattgaagaaataagatatgattttagagaacatcctgagcaatttcacagctattttacgaaaatcatgaagttgataataatatccaaactaaattgtcttgaaaagaacatcacatctttgaaatatttcaatgaggtaataagcaggattgaaggatgtgatgttcacaaggtaaaatatggaaagcctatgatatttactaaattctttggttatgaattcaattatcatacagtaagagtcaagataaaaattactgacaagtatgcaatagacatatccttagagtcaattatcccagattttgtgaaagcatttgacaaactaagtactgatacgaatgaaatcaactggaatacaagtaagcattcaacaaatgggattaaatttggagatgatcaagagagaaattcccaagatgagtcaaatcttcatttgattgagaaggaagcccaaataactttccatttattggattcattcatccaaacattatatctattgatgtctcaaccagcagtaaatactaatagtctaagtggtcgaaatattgaaatcaaagatatttcggtctctagaaaaattctaaatattgaaatgctcgtggatgaaaaaacagtaattttggatcttctcccaaagtctaaaaatggtgtggtggtttcaatagacaatgatgaaaagattggagaaactatcaggactgtgatgttacaaaatacttttaactgaggtttcaaatgttttggtacatatttagatacttcctactgcgcccctatctagtaatgcagccaggaacagtattcctattgatagaccaacagttaatctacctaataagattattttatttcttaaatatgaaaaatattcatcggggacatctctttgcagaatacgagattcaacattcttgtttagaagtaaaatgtgaataacgtatacaattatcatcactaatactaatatgattttagctaagagaaaatatccgtatgtagattcaaataggaaggaaggctgatccaaaaacgatcgagcattatacactcctgtaatgactagtaggatcaaagaggcaccacctaggtagttgaatcggcgtcctactacaaccatgaatgaaattctcttattggcatcaggcatagtcttcttaagaagaggggccaaaacaatccctagaaaaatagctccacctacccatattgaagaaaaaactagatgaatccatgtaactaatggatcaagaataaacattggatagtgtcatatctatatcccataatatattattataaacaaagttttttaataccaatactttacagattaattcgatagagtattgtttttaagtagacgcagattagtattgataggaacagctacggttatcataggagtcattgtattattacctttaatattaacaataaccttacctgatttaagcgccgtagacataatagtaaagaatatagaattagaagatatttctgaagataatattgctaccttaaaggtagtattcaatataaagaatccaacagagcaagcgttaactacctcaaaaattgattatgaattaaatgctaacggagaatcaattggagagtatacaaagtcatatattgacatacctctaaatggtagaccgcagctcttgtcaaatacagatactaacattagtgcagtgatagaaacaccggttcttgatgaaaaaattaggtcggattttaggaataataatcaatcattgcaaaatatcgaatggacaattaatggaaatgcaataatagagtcaggatttagttcagctccaaaaatatttaatgcaacatggtaaatttccattttaatttcttatatggtattttttgagtgcgcttgagtttgtattcgagttggagttggagttggataaaaataaaattaaaatgagactattttaaaggagatcttgttctggtggttgctcctcctgagttaatatgaatttatcaaaagaagtcacaatccattcttcgatgatctgacatctagcaggactatattgatttgattcatcctcatttgaacaaagatgttgataggaacaacaaagacaaggtgcaccttcgaccatacttacatcaataggtttttgttcttcagcatcaatggaaatagtcttttttacgaccagtttatacgtccatctacctcgataaagtgctttttctcgtgtaattaatgactgtttttccaaatttcctactagtcttgaaccatctctactatctagcgagaaaagtttgcataattcggtttgaaaaacaccctcttcaccgcttacggtgatagcgtcgaacactttatcaataagatcacttttagaacgaacagataattttgaaccaataatttcagatgacaaaacatattataaacaacaaaatgatataaatgtctttatcacaaaatgacaccacagagaaaatggacaacttataatatacgacagcagatcttcgaataagaccaacatctaccttgcagcataggtttatccattagggggagtatctggaatcatatattttactggtaaaatagcttctttttaggaaaaattacaaagaaagtgtcgttatgaaaacccaataaatagaaactcctattaaatgtgaaataacaaactagattcaaaatcaaatcttaaatgagtgaaaataggaacttaaaataaaagaacgcgtttgtttttaactaatctattgatccaactattcactctatcaatttatggatgcatacctgaattttcttccggatgtgtagataggacaaactcgtcaagtacatatttgggtgtactaattggtgccttaattggtgtaattatatcttggtggatttactatagacaaaagaagattaccgaaaaacaagatgaggtaataaaaaaattgcagatttggaagaattacacctgacattactcaaaaaaatagaaagattagacaaacaaaatgacaagaccttaagatctatcctaaatatggaagaaggatttgaaaaagaaagaatgaaagatgtgaaagatcaataaatcattatgaattagcgttgatataaaagaaaaaatttgattgtttgggattttttaataagctatattcacaaagtacatcagatatagcagcgaaactgtatttgacaatacgtcataaaaaaaacaaaattaggctacttgttatgtacatattacccttggggcgccgaatagcgtgtctacatgcatttcattcatttagattttttcttgtcgtttttacgaaatctttagttaaatctgaaactgcagaaatatcttgtcctctcatctggtttaccattttctcaaaattttgattactctgctcgttaggtagattttgcatgcgaaactttattgatgaaattaactgattgtgtatctgttcaagctcggacggattcttctttggtaattggtataaatcatggggaccaataggatatcttggaccaagtctcttaatgttattatttacaaaatccataaaatagataaatctaatatccaataaaagtatttttttttgaattttcattgaagacataatttaactttgagggtacatgcccatctcggaagagcccataatgcgttgaatggcaaaagcagaagagataacagagcaaaagtgggattttcatttctccaattgtcggtcaattgcgaaaaagtaaagtcaaaaaatggccctatcaatcatcaactcatggaaacccatctaattatgatcactattattaaagacgttactaaatccttaaacttaagaggacagcaagagtattgcctaatagtatattgattaatgattaatgatataaagagtagctggtctggataccctgatttgaaaactaaataataaaattactggttgggtttttctatttgccatttataattttattgtaataattatgatcaatttttatcatcttacctgtcgccgtcaaatcagttagttcatcaaaaaattgattactttgagtaaaggtttcactcccaaaaggatgcaaccagaaccttcgcctagtcaagggatgattctgatccttgggattaatatatttcatgattggaccaaattgaagtacgtattttccaaaccaaagcccaagtcctacattatgtactattttgggatattttattaatatattatctatctctgaaagatcgacatagaataaatttacattattttccgaatgccattttatgaaaagtaatgaactattttgatttgctcgaatatcatcatctagcttttctttttccatgatcagaaacctataatttttcttgtttgaagtaagatgctttagtcgtcctaacgatttttcctgatgacttaagagatttagaggatcattattttgtaattcccagtattgtcctggcggtaagtacgttgcagaaacatactcctgaccattttcaaataataccctatatatcaggcccgtagaaagtaatccaatttctaaccccttcgaaggattagttaattctttgaatttatttaaaatagttacaaaccttgcttcgcagaaattttgtataggggctacaaagttatcagcaaatttttcatattgaataaagggtttaagatccaaattaaattcgatatcagaattatccccatattcatctctttcataaaacgaatatacattctctagttcattgtgatgttttaacatgattttacctttatcgtataaagtcaaaccgaatttattcttgtcaaacaaataatcgttttttattttttgataagcataatcagttaataatatttgatttggtcttgctatatccattattcttctcgcgagaactaactcatgaccccagggtgcaaattctgtatgtacaccgtcttggaaggaaagaaaagatccgaatcctattccaatccgtacaaaaattttcgctctattttctacagatgagttgaactgttttatgtttttatgaatatgaattgaaagttccaacggatgatcatattttaagaaaacgatcaacatcccatctcctgtgaatgacttgtatatttcaggatgtttttgagtatcgagaaatcctgaaatcaagtctttaattcgatttatcttttctaattgactcgatatggataaattaggatcagaagagccaacgatatcaataaaaaaataccatccatcacctatgctctgtttaagatcatttccattcatattcccaattatagtttatttgttgaatgattccaatttataactgttagagtgtggtggcttaacaatctattaattattccaagaaatagcgacgaaataatgaacaaaaaataagagtcacaagaaaatatgtaagatagtcgatttcttaaaaatagaatcgatagattatgatacgtccactatatcgccaaagtcaaccatttctcttatgtttccaaaagttttggcaaaagaataggcactagccattagacacatatcctcccttaatagatcaaaaatagagaaaatggtttttacaacaagtagtaggatcaatgttgatcaatcatgttattaaaatcaagtgatgattcgataagaaaaaattgatacattaaaagtttgtgagtacgtatcacgatattcgctcctcgatttaggaactagaatagtccgctaaatagtaaatacattcctctaaaataagatatctcatgataaaataaaatgctcgatctcaattgagcaaccaacccacctacatgtatggacatatatcaaacactgttgaaaaattttttttagagaattctaaaaggcgacaatttattatttaatattatagaaagaaatttatctaattttagatttttttcgttggtttatagttagcggttcaccaaaaaaataatacaaggatgaacatatttatcacctcaaattgaacataaaatgtgattttgacctctggctaattatacctctagtagtcaagaaaatgcgatattatgtaacggactttctaaagtatatggagaacaaacagcagtagatcaaataaatttaaaaatcaaaagtggaagcatatttggcttattaggtccgaatggagctggtaagaccacagtaattaagatgttaactggcctgtctaaaccaactcaagggagagcagtagttgcaggttatgatattactactcaaaccttaaaagtcaaagagaacattggctggatttcatcggaagtcatattagatgactcgcttacaataatggagaatatttggattcaagcaaagttacatagtcttaacaatacttggaagaaaaaagcaatagacttattgaaatacatggaattggatgaaaaagacaacaagaaggttggaaaattttcgactgggatgaaaaagaagttagaaataatcatggcactattgcatgatcccaaggtactgtttatggatgaaccaaccatcgggctagacgcaagttctagaagattgctttggagactgataagaaaaataaatgagcaatatggagttacaatactattaactactcattatatcgaagaagctgatgcattatgtgacgatatcgcgataattaataatggtaaaattgtagctagcggctcaccgcaaaagctaaagtctagagccaacggcgatattatagaaattgatttcttctcatattttgactataagaacttagaaaaggtcaatgggatactagaaatagttcaagtaggcctagaaaatactgatccaataaaaagaacacgacccgagcgcgctttgaggttacgcatcaaagtcagaaatgctgaaactattttaccagagttaatttctaaaataacagaatttcaaccagccattattaattcaatcaagatagaaaagccaaatttggaatcagccttcctagaacttaccgggaaacgatttgatgaaatagaagaagccaccattgatcaaaaatagaatcgcctaaaatcaataataaaagtcaagacaagaatgatcaaaatattaaatcagcttagtggtttgtatataagggaaataaaaactacttttagaagccccgccataatcgtgctaagcatcgtccaacccttattatggataattttttttgggagcagttttgcttcggcaccaagaacctttcttgaggatttttttcatacagataattatatagcatttctcttggccggacagctttctacttcgatgctgtttataggaatgtttagttcattaagcctcattcaagataagaaatccggatatctaagaagaatattagtcacacctaccagtaatcataccatattcttatcaaaagtattgggagcttcaacccgtgggatgctacaagttccaattgtctttgcgggtgtaatgttatttggcgtacaaattccagacatatttggaataacggcttttattgtatcattattcctactaagcttaggtctttcttcggtatatctatttttgactatgaaaagttcggactggcaaatccctactgtagtagccaacttcataaatctccccctgatgtttgcaagtactgccctatttacgagcgaaaactttccaacttggatgcaaacaatttcaaacttaaatcctgtttcgttttcgtcgacttttggaagagaaataattatttcgggtagtattgttaatgttaactggatgtatttttcttatctctttatctttgctacttccatgttactaataggcgtaatagtagcgaacaagactttgaaaatagattgatataaaatgtagattaggctttcattcacacctacatacatatcacttctgttagccataacactctagcaattgattatttattgtgactacaaggtacaaggtataaaattagagtgatgggaaccacaaggagcacttgattatattatatgatagattgttaggtaaagcgcaagacgatataaaatcgataagatgaatcttgacccaacttgagataagggataacttgaaagttcctgttatgagaacctttaattcctgatctctgttctgaaattacgttatatagtatctattaccaattatacattacatgggtgttcacttatctgttttttgtcttttttgtttcttttcatctagtttggtattagaggcagaggaaccgtattttataaatactggcaaaactaatggtagaggtattattttcttcttgtcaataccttcattgatctgttttgcagcatcgacggattgatttatttttgataagataatatttagattagaaactgtatcaatgtaggctttttcaagtagttgtttattgttgtttagaatgtagatctgtttgttcaggccatctatgtttgaaatctgtttgtttatttcttgattaatattttttaaacgttgtaattttgctataaattgttgccaataattaatttcattagttttgatatgactgctattgttttcagtatatttatcagcactttgatctaatggatccgataggaaatcataatttctaaaaattgaaaaaagctgattcatattgataatatctgtattggttagtccattagcattgaggaagtttaaactagaaactgccccaatttgcaattccagatattgtttgtacccgggtatttgattttctaaatctttcatctggcttttcaattattctacttttttttcaaacccaagtttattatcatactgcttatctaaatctacaaaaaataatttcactgaatctttgacgcttaaacggtttgccaaggctgattcccttaccgtattacttaattgtttgagttcttttaatccaaatccgttatcatgtaactcattaaaagtattaattgtttgcctataatagtctccccgtccttttaacgaggaaatctcttttatcaatgtttctctagctgctacattattatcaacttggttttgggttagatcgatttcgtttcttaataaatttaaatgcctgtattcagtcaatatttttgttacatcaaaaccgtattgcttaaaatcatcaactgcgtttacaaatgctctaaattcctgttcgatcagcaatccatgttcataaaataactcttgttttagattttcataccattgaaaatacgaatagactttttttctattccgagggttttatctaatttagaagcgatgtcttgactttgtttagttagatcatctatctctttagaaaccgaaatcctaatttttctcaggtgtcgtattcttttactctcttgttttatataaaaagaaacacttgaagcaaatggtatttcttttcttatgttttgttcattttctttttttccaacggtgttatttatgtctgaattatatgtatcatcataaccattatctttatcgctttctgtagccaaattatggaaggatgatagtaaatcctcaaatccatcttcattcacactgacatcatattcgtcattgatgtcgaatttttttaatagttgaacaatcctaaatccttgagcacactcttcaattgttataccagactttcttacttcagacgtaaatgctctaatttcttctatgtttgtcccggctatattagacccccaatcttgtattgttattgacggttcctttggataatggggtttctcggactatttcattcattcagaatgcgtggaggtattttgtattacctgtgacttgagaaaagggtgattttactcaacatttaatatattattctgtcatttacaaatatggtcatattactggtcaattcggtcactagaatggttaatacggtcattttctcggtcaacattggattaaaatagaaatacagttagttttaatcagttatttttcggatatttcataatatatttaataaatctgttaagtaagaatcaaaacatgttagaaatgaaaaaactgaacctattatacaattgatatcttcaaaaaaataagcattagatataattttctgtttttaattgattcagatttagccgacaaatactatttattttatatttaggactagtagcatcaagtttattatctacatcatataatcttgtttcattcaagtaattcacaaattcaatgaggattttcaaattattaatatatgatcttcaaataaccctactccttacatgcaatcataaatatcattaataacagaggtattatatttactctttagagaatcaatcgtttttaaaagagttgtaatcttaattgacacgatactttttaaaacctccaacatgtagtcgcagtataactaacagacagaacacaagtaattcttgtattaataatagtcgtattagaatacaatgatcttcgttccttcattttatatttataataccaagtatatgaattcccatacttaatgcggtcaccgggatttgaattcccgccacgtctttattaaaagacatagtcccgggttacgggctttctccatatgaaattatatatggaaggccagtgtcctaaccaaactagacgatgaccgcaacacaaattctttattttattctgatattaaacttttccaatatcatcatgtccagctaaagaaaagttaatattgataatttcttactttcttttattagaaaaaatatagtttaggagggtatctattgctttattggttaatttatgtttataatagttggatcctttttttggttcctcagttagtttgtctttttgtatgacctcatatggtctatgatctagtgcaccctcaaaatgaactttgaatttcttgagttttgaaaccacaattgaatcaaaaacttccttttgccaaactgaccctataaaataaatggttggtgggtttgtaagattagttattttaaagagaacgttattgataacagcttcaacagttttagaattattatcattttcaatatattgctcagaaataccgccagctagcaagcgatcggtaataacttgggtatattcattttttgatatcaaaattactgaggtgttaaacttgtcaggtttagatttcattataatattgaatgtctggatgcataatgcaattcttccaatgacaaaatcaggaagtgattcatagactatattattggcaacttcatcgcctaattcactatttgggaggccatcccgattaaaattacaatataatagtatcagattaccgtaagtaaaagcattatcagacaatttgataatatggtacatacttacaaatttatagataacgaaaatcaaaaatatgagattaagttgatctttattttactaattggtatttagatcgataccccctcggatttatcatcatatcatcataattatacgaagatgaatttcctataataatcgtagttatcatgcccatcatatcaggatattctaacattttgtctaaattagtaagaacaattgactgactgtccctaaacgcaccctttactattgcaactggagtttcggggctcctgtgttttagaaaaatatttcgtgcatccttaagttggtgaattcgttttttactagatggattatacacaacagtaacgaagtctcctaaagcagcagcttcaactcgcttaacgataatttcccacggtaccaggaggtcactcatgctcacaactgcaaaatcggtcatcaatggggatccaataagtgcgctgcatgaattcagagacgagactccaggtacacattcaacatcaattcctttgccttttttccatcccttttcagcaaggatttcatatatcaaacctaccattccatatattccaggatctcctgatgaaactagcgatacgatgccccctttttcagcgaaatctatggcttgattagcccgatctacttcctgagtcataggatatctgtagacttctttaccgttaatgagatcttctactaaggatacataggtttcataacccacgatgatttggctttcttcaattacttgtttagcgcgaaaggtcatatgatcatgatggcctggtcctactcctacaacatataattttcctgaactcattacaagatattaatcgtctgcattcatttatttactttcttttcttcaaattaattgagcatatctttgaatcatatgaagattaatgagataatttaattacatctatttggaagaatgaaataattaaatttgaataccctaatctgtcaagtatgttgccaatacgataaaataaatcaaactgccttacctaaattaaattccttatataatgatcttactgctttttcacaatcatcatcccttacaatgaatgccaggttcaattccgaagacccctgagctatcattatcacattgacatcttcttttgctacggaggaaaaaactctacctgcaattcccttgattccacgcataccggaacccaccacagtaactatcgaaacatcctctaatacatttagatgttttattacctttcccaataatttcaactccagggatgttatggccttgcccaaatcatcctttctcaataccatggaaatacttgattcagacggaccttgagatatcatcattatgtttactttattctttgccaatgtatcaaaaatgtttgcagctgttcctggtgatcccaccattccaccaccgctaacgtctatcaatgcagtgtttcttattgcgattatggatttaatgatattattagatattctcaaattttgagttattgtagtcccagggtgagataaattaaatgcatttcttattttcagtgggatatttgaatccattactggctccaaagctcttggatgaatatattttgctccgaataggaccatctcagctgcctcgctataagatatctcatcaagtacctgtgcatcttttacgatcaaaggctctgcagttaataatccatccacgtcactccataaatatacctcgtccgcattaatacaggaagctattatcgtggcagtataatcagaaccacttcgacccaaggtggtaatatatccatgctggtctgctgctatgtacccagtaattacaggaatttttcctgctagaatcaatgggatcaatttagcatttactctgaactttgtggtattcatcaaaggtcttgcttcaccaaaattagaatccgtgacgataccaatctcttttccagtaagaaaatcagaattcaagttgttatttcgtaacgaatagcttacaattggagctgctaatcgttctccaaatgataacatatggtccaaagaccttggtgtaatttcagaaatgaaaaccaatccctccaaaatggcttggaattctttcaaaatatccaagattacgtttttggcttctgcttgcaatttccgatcggttatagtattttcaattaaatcaatatgaagaagggtcatttcatctatgaatgtctttatagcactcctttttccctttattatcagttcagaaagcatgataattttatctgttactccagagatagctgatattacgcaaacaatttcattatcttttcctttcaagtttttaaaagaatgtacaatatttacaagagtctttatttttgacgatgagtctaagaccgaccctccgaacttcattattattctcatatcaacgaattacatggtttattaactaatgggattaatagagtattctaaacccaaaatttgtatatattagtctcggataataaccaatgagaacatttgaaatatagttacagccgagactttttcgtcctaatctaatctaatcctgtactcgtggtgctaaataaaaatgaattctaccgatgttggcaatcctaaattcaagacgtatcggcatctttgtagaatattcgatagcagctgacacaccaacagagctcaccgattttacaattttcaaaagatagtcaagactataagttgcctttgattcttcctttacattgatctcttccaatccttcgctgtttggttccattgtaacaacagcttctcccgtatcacttttacctacaaactcaatcctatcaggatatgattcaatttcaacgtattctgatacgacctctatatcagaaaggatcttatcaaacgaagataaagaaagcaggagtttggaattaaatgacagttttggtaacggtgtagatactgttgtactctctatgagacgcattttgtactctcttttgtaactacccatcgtttttatcctcaagacatcttcatcaatgatggacacttccaattcgtctttcttgtctgttcgttttatcaattttgaaaattcagaaatccggaccccaaattttaactcagaatcgcatttatagctttcaaacgcagtattgggccaaaaaatatcaattaatgctacatgagatgggtccattcccctgaaggaaatcccctccgaagtggcttcaaatgtggcttcatctacgagagtagatatagctgaattaacaaccttccattcttctggagactttgttttcgcttcaaacatcaaattaatcaactaaaacaacaatcatctataaattccaatgggatatctgtaatcgttcttaagaataatttctccaagtgtgactgcattttgtacaccgatagaattgagttgtggcttcatcagcagaccttgtctgcaacatccaccaaaaagccatattattaaggcactttgggcattccatattggttgtaggcagtgcctcgatgggtttttcagagtccattatctttagaggatcatcagaataatcataattagaaacagtttggatcacacttgcagtgttagtcgtaccatttgtatcactcgccactatgtgtccacattttaggcatgttaggactttttcctcttgtctattccttaaacgtgcatcgcattttggacaaaacttcattaactagttatcaccgcattcaatttcctatcgtgagcttcaacatgccggcaagatcatttgtaaatttaatagctaactctacggattcacccagtgccttgtatggctcgttcttattggttagtatctttaacatgtattctttgattagaggatgctttaatacaacacccgcgaatctgttatcagcattcttttgtagttcatgttgaattatatacaaaatagatatatctatgtcatgtattttaaattctaattctttgtccctagcatgtgtaacctcagcatgcatatataaaagacaactacatattgaggatataaatgataccttctcagtatctaaattggacgaaaatgaaagtcgaatcagtgctttaatcttgagaggagcacaggaaaggccaatgaatgagaaattgtatatattgaccttaagtttttcccttgaggggtttatccgacaagtattaacgcagaagaattgggaaaaagcttataataaacacgataattcattgagactcactatcagactagacatcaaaaataatggaaaaattattgaatctatgaaattaataagaaaagctatttttttctggaccagaaatccaaaaattgatcataggatttggattatgatagttaaagatgacacccccttttatccattggaggaggaagaagctagacagttgttgtttgattttaacaaggatatagaaataaaacctgatactctaagaaaaggtaagaacaacctttcagtattggtggaattgtcatggggtaagcatgaattcatagagaagaacagtttgaaagaagaatcaaacatccaacaaatagacaatgactagacctactaagcaaaataatttaatttaaatatcacacataattgccatctactatggctaaatttgatggtatcaaaggacaagaactcttagatgttgaagagaaagacaacgaattgacattaattttcaaagacaacaggttcttatttgtaaaaacagaaaacggaaaattgataattgattcggtaccagagtgaccggcaaggtatcttatctcaggccccatggcttgaattgtaataaaatcaatttatttcaactaaaattttctcttcattcagatgaattttgtatattttaagatcgtcagaatgtctccattgttcattttgttcaatccaagtttcatcctttttccatgacttcatgttttccagtttgcctgtaaaaatattatattcgtatccgtgcatataacaaactacattatctccaaggaagcttcccttggataatgatgcacctttatgtgggcatctattgttaaaagcatatacccgattgtttctttttccaatcaaaatttcttccctttctatcgtgattttctcaaaggaattttcctttaattcgttcaatttcaaaccggtatcaaaaatcacgaatacaattgaaaaaatcctatttataaattgatcaaagttttgtatgtcgataaaataaaaaaattagagtattggttttgtcatggttattgattctgtcatttgtttatacagtatcagaaagcgtcttcctttttcagtcatcttataaatttgagccccatcatcataaatgatcaagtcgtttttcataaggttagataagtattctttcatttggagaaacgaaagatatactttgtacatgattttagcctgtatcgcaccattgtcacctactgtttcaaggatcattgctataatttctaggcggcttctatttttcattttatccaaattattaagaaatttaaaaaataaaaacggagcaatactaagaccaatagatatcttttagtgattttttagctttgatggtattgataatataatatagatgatactaatcattcaaacaagcagtttaatattaaaaagatggcaattaggaatttaactaggagaatgaacgtaaacctactggaaaaaaattaacgattcctatatttaacctaatctttcttccttattaacaaacagagaaaacaatttgttaagcctgggaggaaaggtgtgttggttagtaagtacggaataaacaaaggctctgcataaaagacatatgcaacgcatatttgtattgtagcatggatatagattgctacaatatttcaaaccgacgtagagtctgatacgctgaagaccctcattactaactcaatgccacagagcaaagataaataaaatatttcagtaacaaaacatgtattgtttaagcggatcgcagatttaagaacagaagataacataggaaagaccattttattaagaggctggatccatagactacgaaagcagaaagaaaaaaccttcataatattaagagatgatagaggagatattattcaagctatatgtccttctaaattatgcgaggatttgatgattgaatcttccatagaaatacaaggaaaattggaaaaagatccaagagcaattgaaggtggatacgaggtaaaagtggacaaaatattgattttcaatatagccaatgcagactatcctataggagagtatcagagtgacgaaatcctacttgattttagacatttgtcactaaggacaagaaaaatgataaatgttggaaaactacgaaattcattattaaaatactccagagaatggtttgctaaagacgattggatggaagtaactccaccaatacttgttcagagctctgtagagggagggtccacactatttgaggtgaaatatttcgatgaaaaagcatacttgtctcaaagttctcaactatacctcgagtcaatgatttactgcttaggccctgtatggaccattagcccctcctttagagcagaaaagtcaaggaccataagacacctggcagaattcacccatttagaagcagaagcaccgtggataaatatgaccaatcttatcaccattcaagagaaactaatattcagtattataactcagatcagggaacataataagaaggaactagaatttttaaatactgctgcaataaaaaaattaaatgaaatttcaatcccatttgaaaaaataacttatgacagagcaatagataatttgagatccctagaatgcagaatccgagatcatgatgggaaagataggctgattgaatggggagacgatctaaatcttgaatcagaaagagaactaacaaaggatagatctaatccgatatttgtaacaaattatcctttaagcataaaacccttttacgttaaacaagatccgttaaatgagaagacaggattggcggtagaccttttggctccccaaggatatggcgagatttcaggaggggggattagagaagacaaccttgaaaaattaacaaacaggataagagagacaaacctaaatccaaatgattattcatggtatttggatcttagaaaatacgggtcagtaccgcatggtggattcggtctaggcttggagagactactgagatggatattagattttgacgatatcaaaaacgtgacattatttccgagaacgatggcaaggatcttaccctaaagtcgaatttacgatcataaattctctcctttttttgctcattgtatagtaaatattggattcatagtcagataattttttgatggcggcaaccctttcgattttggaaatgtcatcccccccgcgcgcgatcgaagattgtaagaattggatagagtcatcatgactttttctatcaacaaaatagtggaaaccaccctttcctcttgaacaaaaaaattcttagctggaactttccatgaaaatttcgtcccaaaattaaccctgctattaacgctagtgctctgctctacgtgtagctggaccaccgcctttgatagagatgaattcctagtaatttgattgtggtacaacatataatttaccatgctcgcccagtcaacattttttggcatgatagggtgaacaggatattcattacttttaggattaatcaaaacaaggcaatttgtagttggatataggaccattcgcaccacttatcgatcgtattatcctttttgggccaatagttgattaacagatgaaaggatcgatagaatttcgatcgtcatttagtatcagcaactgttttttgactttccattggatctatagcggtcactgccagtataatattactattaataacataccaataattcctgaatgcggttaggtcacaaaactacctttctgatgttctgaaaaccattgataacgtctagtaatgatgccataatttaccaacatagcaatttaagctaattgatataatcatctgggcaacaaatatgatatcaaataatgggataaaataatattatattgtgatattaataaaacaaagatgcatcttacgcgagatgaggagaaaggattgtccggagaatacggcgaggctacttcggctgcttacaggatattagtagcaataggagaagcaacagatgcagaaaagcttgtacccatcacatgggcacatgtttcaggagttaactacaatactatcggagatagtggattagaatttttaagagagattagcaaagatgggaaagtaagggtaaatacatcacttaacccgatgggctttgatagagaaatcctaccagaattatcgcctgaatttatcgaaaaacagtttgaaatagcaagggcgtatgaaaagattggagtcataccaaccttttcatgtattccatacgaaattttacctataccacaagaaggtgcccaagtgagctttgctgaaagcagtgcggcggtattggctaattcacacctgaatattattacaaataaagaaagcgctttaagtgcattagccagcgcattaaccggaaaatccccttattcggatttgaggattgataaaaacagatcaccaatggttgaaatagttaacgagatggatttagaaaatgaacttgattatggactattgggatattttacaggaaagacaattcaaaagagttgtaccggcatttgcaatatctccgaaaataccgatatatggagtttgaagtcactcgccgcgggaataggaacctctggttcctgcggaatgtttcaatccaaaaaaccatctaaattcatcgaaaaagtaaattatggaaaaagagaaatgaatgagactagagacgaattgaatacctcagaggatggtcaattaatcacttttgggagtcctcagcttggcattgaagagatgagtaaaattcaaacattagttgctggaaagaaattcactaaaccctgtaagattttttgtccaaaatcagtattttgcaaggccaaacaatatggaattatcgactcattacagaaatcaagagtagaatttatttctgatgcgtgtacctgcttaacacctctcataaataagaaaaattacgatagtataattactaacagcgtcaaggcatcatattatatgaaaacatcaaataaggtttcagtagctttaaagagccttaaatcaataatcaaagaatatacggtataagctagcttggaatcacttttaaagcaatagagttgaggtttgatctggaaataatgtgtaaaaagatagttcgaggtagagctaaaggcaaattattgttgtcaaaaaaacccataaattttcttggaatggttaatacccaatcaggagaaataacaagtactagtaacggttttgaaagacaaaatttaaagggaaaaatcctcgtttttcctaattcaattggtagtagcgtaggagcatatacaatttattctctaaagagcaacaatgtagcacctaatggcataatttgtactaacaatgtagatataactactgcttcaggttgtgcgatttcaaatataccattagcttttatcgacaaccagagctataatgatttagtcaattgtataaaaattttaggtaaaaacaaggaaatggaaatcacactagatacagaagaagggaagattattatcgattagagaaatctatataatctatacttttcatctaatgtgtctcggcattggctttcgatgggcgaacggaccattttagaatggaatgaagataaaagtccatatgccgagacgagaggtaaatactttatagtctggaaaattaattcgacatagtatatctataatgatgaatacgggtttggtttgatctggcaggtcaatgcatataattcaaactgcgtagtgtctctttcataattactatttagtcaagaatattcacgttatcataatgcagattgattgataatccaaaacactttagtataaatctttacaagttataatattggtcaaattttgtcctgaatgtggaggtagcttgaattttgatacaattacaaagaactttatttgtaggggttgtggcctttatgctcctagagagaaattcgaagaattgcatgagaaaataaatacggtagatcggaagaataaaagcgacgactatctagactggtggcaatcttctaaaaaagataagaagaacgatcactagttcattagtttttttttattcatatccaacattaataccgttttgcagacggaacaaatttcgtcggttgaaatcccaccacaatttaggcaagcatttttggtttgtttattattatcagaattttttattattttagatagtttattcatggagttgaaacaattgtattttatgcccgggtggattttttctaaatcattgaaaaatactcgaaagtcgctacggatgctttcgttcatataaggacattcatctgcctgaaattcaatacccatgtggaaggcgtaaaatactatttcattttcatataactctacgagtggcttaattttctttaatccattttgatatgttatgggttgaggatacatccagccgattctcccaacatcacccgaaaacaaatttatcataaatgtttgaaggtgatcatctaaattatgcgcagttgcaagaatgtctgattgcattgaaagtgctgcaacatctaatgcccttctcctaaatgttccacagatggaacaggagctaaccttttttgatggcctttttacaatcgcttcatccatacttgaaccaaacaattctttataactgaaaatcttaaaaggcacttctaatttattgcaaaaatctttcactatggtgagagattcatcacggtagccctcaatcccctcgtcgattgtgattgcgactatatcattattattattttttaaaattttttttaagatgtaaagaagaacaaggctgtcttttccgccggatactcctacagcgacccgttgaccataattaatcatggaataccttgaaatggtgtgtaaagttttcttttcaattgaatgtatgaaacaagatttacaaagaacttcaccagagtacagccggttaaacaccactggtcttttgttacatttattgcatgtaggcagcaaagcgctaagtacagcatactaacaaacaagttaaaagtgttaaagtcaaaacaataatcattcgttttcaaatatgcgtaaatttagttttttgtgtttacattaacttggtaatgatgtttgtctataatccctttatgatcctccaaaaaaatcattaatggttaacatagcatctcaagttttgtggtgaaaatcttagagtgaatgtttaatggtcacactttatcaattaatccttgccacgatcttggatcagcggattattagtccctactaaggtgcaaagacttgatctcactcgaatgtgttattatgaaaataacatgaatcccggtgtgacgagtaccaaaattatagcgcatagttttgataatctacagataaaaaatgctaataattttggctcaatccgttgaacaaatacaatatgtaaaaaacatcatactgaaagcctaagaacgtgtaataaatttctttaatattgcaaaaatcatctaaaaaaagaaggactaaaccagtaggttgtaaaaaaaggtttatttattttgataaaaagacctaataaacgcgttccaggcattaaaggcgtttgtgatatattcggtatatgcatctaatgttttattatatagctttacattttcacgagtagtatcgattgcatcaaaattaaattgattattggcggtgattgcttttacaaagttatctacattttcattggtcttgttgaagagctgttgatatgtttcattaggctgtgattgagacacgtttacatattcccttatcaattctttttgatgggtaattgtcttattgatagcatcctttgaagattgaatcacttcaagttgaaaatcagaaacagactgtagaaatctaggttgaattttaacatattcatcgaatgattttatcatattatctttcatagtatcaagtgttttttctgccgattgttctgtgaggttgatataagaatttacttttttgtccatgttggtagagacatttgtatttgttgtattaacttctttactcataagttatagatcaacaaggtgacttataaactttaccaaaattacccatttaattccaatgaaaaccgctaaatggtcaaaacaaaaaattaggctttggttccgcagcttccacagaatttttgtccgtcacccatttgtgtaccacagtttgtgcagaatttgccactggcagtagtactaccatcagctgttacagccaacttcttcttcttaccactaactccgcttgcagcaaagaatgcagcactaaccccgccaataattacagtgattagaattatcatcaatactgtgctatccaaattagttccaaacattgcagtaccagaaccgtatgcaccttgttgttgagcattactaattttctctttagccaaggtaagttgttcttccaaagttgcagaaccaggttgaccgctatattgagcatatgcaatatttaatactggtaataatagtattgaacccattaccaatgaaaaagctgctaccattgagtatgccttgttcatattaaaaattactcagataggaattatataacttttatgttaaagaataatgataacatttaagatatgtaaattttcatattaagacagagaaaaatggcacgaactcatgcccacacacatggaaaatcacattctattagaccaacttctaaaaatgcaccctcttgggccatcgatagtcaagagattataaagaaaattgtagagtttggaaaggatggtatgtccgctagtgagataggtttaagattaagagatgaatttgcagtccccttagttaaaccaattattggaaaaaccattactcaaattatgcaggaaaatgatatccagagatcaatgcctgaagatctagaaaggctccttcgcaaggccttgggattacaaaaacacttgaatgtccacaacagtgataagagaaatgtcaggtcgctggagttgatagaatcgaaaatacataggctatccagatattataaaaaaacaggtaaagtaactaaatcttggaaatacgcagcagtaatcgctaaactagagtagagaatgcgatttactgatcgtgatcatatattaaatacagcaagtcaaaaattattaaatcaaatagaacaccaaaaagatatttttattctttctaattcaaccgtagatggcttagtgggtagcgccatcttactaagttctattcataactcaaaaggaaatacgacagttagatgcattaattcatcaaaagttgaagactttaaaatagaattgatgaaggtagctgaagagaagcacgatttttatgtttttgtagattttgattcaaacttctttgatcttataaccagcctcatccaagaaagctattatttgtttgttaattcagattcacgcaatttagatcaaatcatagaaaaagataaagccgtaacctttgttaatccgtggatatggcaaagggatagtgacaaagaaaataaacatacatcgtccagtttgacatatttaatagccaaaaactttgatagaaagataattcatagttctttcttacctatcgttgctgcattttcaaagaacattgattttaacaatattgatcagacggaactcaaagaaattttgcaatctgcactggacctcaccttaatcgagagaaaaaagggactaaactttggagtaagtgaaactacaccaattgtagacgccatagaaaataatacaacccatttcatcaaaggagttacatgggataaagaaaattcaattaaaataatagagaaatcagggatcaaaattactgataatcaaagaattagaacatggaatgaacttgaggatgaagacttcaataaaatattcaatgccattgaaaagtacatagaggaaaattgctaccataaaaacaaaagcgatgacaatatcaaagagatgaaaaaaagaaatcgagatttattgtttgggtataactacatcttgacgaatgaagaaacaggtagcatcttaaaaaatattgggtcattttctaaatctctagacttgtgtgtcagaaatcaaacgtttggactcgggttatcaatatgcctcggtgaaagagacgacgcaatgatgcaagtaaagaaccaaattatagatcatgataatctcataaaaagtgtaagcaacaagatttttgatgaaaaatggagattctatgatgacaaggaaaccatttacgttaacggggagggaatactagatgaaaaaaacattgatcttttcacttcaattctcgaaaaatctgtttcatttgcagacagattgatttgtattagaatcctgtcaacagagagtgatgacgaatacaagtataccctgataaaaccaaagctagcaaaggtagactttgttaaaatgaagaaaatgatttatgagcttgccgaaatccatgacggtttgaatagttataatactagacccagtccaacaagtgttataatagatattgctgacaagatagagatcagagttcccataattaatttagaagtctttttatcgaatatcaaaaaaatagttttggatgcaaaaagatcctgatatttgtattgatacaaaaatagtgatagaatgtaaagaagaaaaagatgtacaaaccatttttaaaactctaaatcccgataataaagaatttcccgaggggctaaaaatggaagtacagacaaacagaacacagtttttgttgaaagtcggattcagagataatattggaaggaaaaataatattaatacgcttataaacacaattgaagagatcatggaacatattgctattatcaaagaagtgaccaaaattgattgatccaaagatcataaaagaaaatcagacagcagtaaaagaaatgctagctaatagaaatatggattttcccctggacaaactattcaatgcagacaaacaaagacgggatttgatagttgaattacaacgcgtaaaacatcagaaaaacacactgtctaaggagatatcagaaaaaaagaagagaaaagaggatgcgtctatgaagatcgatgaaatgggtgagatcggtacggaaattagaaaattggaggaggaaagcaaaataaatgaagaattattctctaaatacatccgtagcttaccaaatttctttcacgaaactgttccattaggcaaagacgaaaaagacaataaaataacaagggagtataatggaaggctaaaggtattaaaaaaacctaccgaaggaattgaaaaatcagcgagtgaaatcatggcccataatgaactttcagggattttacaaatgaaaaatcatatagaccttgcaaatgaacttggcctaattgatatggaacgggctggaaaaatttcaggatctcgtttttattttttaaaaaacgaaatggtcaaactaagtatggcactatctaactttgcaatagattatttgattaaagaaggatatacagtagtgcaacctcctttcatgattagaagggatgcaatggaaggagcggtcatattaagcgattttgaggaaaccatttacaaaatagaaaatgaagacttgtatatgataggcacctcagaacaccccttagcatcaatgcacatgaatgaaatagtggacgggaaaaatctccccctccgatatggtgggattagtacttgctttaggaaggaggctggtgcacacggtaaagatatgaaaggactttttagggtacatcaatttgaaaaagtagagcaattcgtcttttgcaaacccgaagactcttggaaggaacacgaaaaactcttgcaaattactgaaaaattttatgaaattctagagattccatttaggacaataattttgtgttctggagatcttggaaaggtgtctgcgaagacttatgatattgaagcgtggtttcctgctcaaaattcttatagagagatatgttcatgttcaaattgcaccgattatcaagcaagaagtttaaggataaggtatagaaacaatcctaacgatgaaacatccttagttcatacattgaatagtacccttgtagcgattcagagaaccctggtcgctatactagaaaattatcagactagtaagggaacaattatggttccggaagctttgaaaaagtacatggatgatatggcggaaataggcaaataaggtaaaaaattgcatatccatgttctataaaaattcatccatgcttgtcaagatgttcattaacttggttttcatataaacggagaaaaattaatcgctaatgagatattgttttgcaaaatatagcaaccaaaatgtatatatcttagttgtcaggctcatattataatgagcttgttaaacgtactgtctcaaacaagtagtatgttccaaaactttggcttacaaatcgggcctcaatatgatccattgttctatgatgtaatgatatacatatttggaaccatgttatttggagtattcttgctgagtgtaattgcattttggttgagaaggaaaggtcttggggggtcatctgctaaagagaaatggactcaagaattagagaaatacttccaaaaagaacagatagggctaatgcctgacgagaaacaccactggtaataaataaaaaggatcagtactttttatttatataataaatttttaattattgtttgtttctcttgtatcaaattatagtgagccagtggggtctatcgcttggtgaaattgagactatcaataatcttttcaaagactattatatttcagaaaattctattaatcaagatgtaggctatgcaagcactttagaaattgaatttgtaaaaaacaaagatacagactttttcgattgcataacaatcgaaaaatggacagatctggtaggagttatcaagaatattaagaaaagaaggggaagaaaagggcttaaattaaaaataaccataacagattattttgaatctgaagataccattgatgttaatgtgcacgtcaaaaatagtgataaagcagacaccaaaagggaagttgagctattattttttaagagaacaatttttttgttagtacataagattgactcggaatttattaaagggcttgaaagaatcgaggtagcaattgaaaacttaacagaattattcaagaaagtatctcaatcctcattttcagaggatcaatatgaaaagaataaacatgaatacggtaaagccgagtattacgatagtctgctcaatgactatgacgggactacaggtaataaagaaagtgagatccaaatgcagatctttttatttgatgacaaaaagagggtttggaaaagtctttagatcagtattaatatgaataatgaaaacgcagtagagcgattgctcaacccatagaattaaaaaagacaatctttaggaagataaagtatggggagaaaggatgacacaagtggtgtcgaaaaaactaagaacatctttctagaattcaagaacaaagaaatcaacgtgggagaagagttggagtgtataataacaattgattatactggtagattcgacagcataagtataaattcccaaatcgaagattcgtcagatgtttttacgtatacagagattaatggtaaaaaaattaaccatccatacgcaagactttctataatgaaaaaggagcttcaaaaccctagtagtataagattgaaagctattacaaaacatgttcccaaaaatactgaatcagttgtcaagcttagagccacactaattcaagaacataaagaaatagcatcagatattaaattcataaaaataaaaaaatgaaataaatttatccgaagctgggttcaactgatacctgaccagtcatccaaggatgcggttcacaatggtacatgtaatcaccccgttgggtaaaagtgaagtcatatgtaccttgaggtggaattagacctattgtatctagagaattgaatgggccattgatagggtctacatagttattatcgctcgttaccgtatgtgcagtaacatcatcatttgtccaaaccaccttatttgagacacctaatgatgctcttatttctttgggaacaaagaaagttggatttgcaggtagcgaagaaccttcagcaattgcaatatcagtagttccagatggattcaagatttcctcggatacttcaggttttgcatttattgctggagtataaacgaattgataatatgctaaactaatagtgactatcactacaaaggaaataatactaatcccgccaatttgggactgtttttttactttttccaattagattttattccttgatacaataataaatatttttttttatgaaactataaaaatagaaaggtacttggtaaataaaagaaatcaagagataaaattgcaggagtaaaaaaaattaggtacgattcttgtctggattagtagcttttgatccttccatatccgaaattgaagtagcaggggttgattcattggaattaatctgttggcgtaattttccatcattttgatcatttttgatggaatgtaataaaccagtagtggttcgcaaattcggattatagtcattatctggtgtagacccagtactagcatcaatacctgttgcggaattgcttgaggacggcggtaaagaacttccttttgatgaggatatttcaggaaccgggacaggttttttgtcttctagcgacttatccgatggggcattaaagatgcgatccgaagaatcagatagttcaccagccttagcagttttatccggtaatgactttgtggaacccgcaccaaaagacgggaaaacgaatttgcgcttattggtagttataacttctacattagacttggtaagtccccgcgaatatctataaagatggaacattcccgcaaataccagcatcaatattcctatcaagaagagagagtagttcttcataccatttaatacagcgtaatatgcagctatgttcaagtatacttgaaatgctattaacactataaagagaatatacagccatttagctggaagctgtattggattcttctcggcgggtttttgtttctttgcgttagcctctgcatttttcgccagctttatcatcaagtacgtaaagccaaatgacaatggaactagcaatgccataacggtgtataggaaaatcgggtcaattaccaatcgttccaacaaagacttggtcctatcgggatcgatataaaatccccaatatgtagtaataatgatctgagctatactggttatacctatcgcggttataatcggcctgtccttccaagagaattttttgtacctatctatgaatggaattattaacaatgtgaatatgaatagtccaggccagagtacaccagtagtaaacttgtcgaatgcacttcttaagaaagaatacagccctgtaagataccattctggaacggtgattcccggcggcacatttggatcaaatttaagtcccatatcaattggaaatacacctccggtcaacattatcgctcccgcaacagccatcaccatgggaacatcaaataccaaaaatcgtggaaaatgtactaccattaatcccagcagtacaatgggcaagaagaaaacatggaatgcatagaatctgagtacaaagtcgtgaaacccagacccgaagaacgcgttcatcatgtcgggccccaaaatgggaatggaattagtcagcgatgccgctatagaaatagctagttcagctctttcactaaaaatgatatcatagccagtaaaagcctcgagaatagttaatacgcctaacaagattcctgttacccacagcatttcatttcggattttatatctaccactgaaaaactggtaatacatgtgcagtattgcaagcataaccatcgcattggaggcatgataatgtatatttctcatatgaaatccgtatggtatcgtatcgttaatcttacttacactatcccatgctctatcgagtatgggttcataccataacattaagaaggcacctgtgatacctaatatgataaagactacaaaagttaacataccaaggaatccaagcgggctgacaaacttggtgggtagggtaaattttagccccatgaatatggttctatcgaaaccggtgtaaatccacttgaatagccttaccaggctgttgtcttgattatgtaaggaagcgcccatatccaactaccccatttccagatggagtccaattagggggtttgatccaaacattgccttcatcatcaacctctagatctaacattggtaagacattagaaggtggggcttgaagtgcggccggccctgcaaaagcttccccggtcaaaggatcgtacattgacccatggcatggacattccccacgctttctgccgtcttcaggccaatatttccacaagcaccacaaatgcaagcaaaccatactaaacattctgaaggcagatgcatcatttttttctcctccaagttctggcggtagcctaataaattgccaggttctgaatgcttcttcatttagtactggatcctccgataacggatacacaacagcttcagcatgatttattttgaatgtattaacatttgcttgacttccgtcaggcagaaccacctttgatcgctcttccgaactttcttttggattaggcaaaaattttccccaatctacgaaaggagtaaaggtcataactgtacctgcggctgcaagcaattttaaaaaatctctacgtgaaatcttgcctccgtcaacttttggaggttgtcgttgagacattatattcaaaaatgtggaaagatatcttataaatctttatttagattttatatattcaacaccatggtttttcaccaataaatttttaattgattttacttttccaaaaagaaaaaaatgcttagcagtagcaagctttaaaattgttagatcaaaacaattatacaaaaaagactagtgtttgtagacaatacttaatatattttagttcacatcaagtcttattctaataattccatttctagcagaaacatttgatacacggagaatggtattcgctggatgtggaacaggtatatcatatctcttgttagtatcaataataagtaaggataagctgtttattgattcatcaaaatttgcttgaacttgagaatcactcaaagtattccgatcttctactattacgtcgatgaatttctctccgattatgatttcgggaataaaggatttttccaatttatcttcatccatggattttgaacggtcatttctatttggggagtcgtttgaaaaagagggcgaggaaatagaggaccttcgtcgataattttgtgaagggtattgtttttgtttagaaagcatattcgaaaagaacttccatccaaaagctgttgccaagccgataataaatccgcctatgtgagctagatatgcaactccgcctgattgtccgattaacgcaaatactaattgcattatgaaccaaaatggaatgtacgctattgcaggaattctgacggtagttataaaaaatgcaaatatgatggtatgaatcttggcatgaggaaagaaaactagataagcgcctaaaacacccgatattgctccggatgcaccaattgcgggtatacttccttcacctgtggctacagcgtaaatactgtgtgcaaaaccagccataaccccccaaaaaagatacagcatcaaatacttgaaatgaccaaaacgatcctctaaattatcgccaaaaacgtgaagaaagaacatgttacctaaaagatgtgctatgcctccatgcatgaacattgaactaaaaagtgatcccaggttttgacccgaaagaatcaaatctggaatagaaccatagttgtaaaataatgcaataactgcggatctatttgaaaagttagaagttacaatgacttcataaataaaaatgacaatattcatgccaatcagaccatagtttacatatggccgtccatttaatcgaggagtatcatcatgaattgggaacataattaaagcaggttgtcaatcataaaatagaaaaatatttgtgtttctcacgtaccaaaagggttgaaattaggcatatcgctattcgtttcactatgagcttttctaatatgtcgtcttagccgatcatcttcttcgaatatcatatcacaatatttgcatttctttttattaccatcgtcctcattttttttatttttatcctttgtattttttttatctgtattttttttagaaaataatttcacaattatttacaaaatgaggatataaattaaagttgctattaacatcttttaccaaaattctaccaaactagaataaaagaatgagtggaatttgattattccattactatcatagtcaaagtagactttaccccattcagctttcttagcttccatgttatagtttctttcactttatccatgctttcgccctctactaaagctactatatcatagacaccatatacctgataaacatgttttactaaatctattttttttaattcattaacaattgattcctcactacccaattctgcattcataagcacaaaagcttctggcatataccagataactacctataacaaatataaaaatgtgatttagattcgaatttattagttcaattgaatttcagaatactagatttctggacttaattttgattcatcaaataatttagccctggcccattcataatcaaaaaagtcttcacaccattcatgaaatgaggtatcttggctataaaacataatattaagatcaggttccccctttagagtcggaaaggatatgcaggattctttttcattaaatatcgtcactatgtttgttttatccatcattcgacgttctacaattcccttagacacaagatttttccatccaagtttttttaatagttcatttcttcccttgggaatcacaacatcagccgggaagatataacagaatttgacattattattcactctttcagctatggtttctatcaaatcgattggaacttgagagatgacctccttgatatagtcttgagagttgtggtaaacagccttccatcgttgaagaacagccattacacccacgaccacctcacaattgttcaaagaaccaattctctgaatgaattttaaaggtaggttactaagtgtatgttcttggaaatagtctttgtgtttaaatgggaagttgaagtttggaataagagaaacaataatctcaccatacggagtcaataataattcgccttctcctgtttttttcacaagttttgaatcaattaatcggttaatattacgatgtgattcctgcatagtggcatttaaatccgttgccagctgagataagcgatagggttttatggataatttcatgagcatgtatatccgcaggtcccctgcaagttcaaagaaaactgattgaaagtcatcgtcggcctggctgagcatacgttaaattgagagaactggaatttaaacttgataatttaaatgaagtaaacctacggagggtataaaacaaaacgttttaattggttttggtaatgataaaatttgaagtgcccgggtagtatagaaatgcattaattgcattgtaaagtccggtccagtatgggggactgtcactcccttgacccgggttcgaatcccggcccgggcgctttataggattcttgtttcctcctcagaatttacctcataactaatagtaaggttcttgataataggacgttatgaaaggtcgatattaaattagtaattttgatagcaccgtatatttagaagttttttgaattcgtgctatcagttgttaaataatatttaacaacagtatcgataacttactcaagaggaactttgttacagatatcaaaatttttagggttcttacaaaataaaccattctgcggaaagttaagtctagagaatactgaacacagacagccaggataattacaaatatccacgaattgaccaaagctagtcttagtcaattcttagattttggatttggttttaggatggaatggatggattctttttgtccgtcttggcgtaccatccataaagcgatacagcccatccaacaataattaacatgatagagacaacttctgcatctaccatcggatttcggaattctacttcattaggaggagattgtatattatattccgtatcaggtatagcatcttgaattacaacaggaaatgtaatcgatacccctattaccccaaccactaccatgattaaaccagctattaatattggtttataactgaccatgcaaagaactacattttttcctatataaatataactctattttaatggagatagttagaaaaagtcttacaaccagatgccggctactttatatctaacgatcgaatgaccaatcaacaataaaatatagaaaatgcaatatatgttggtcaattgctctttacagcctagaaaaaccattataaggatattttgataatattagaaaagtgaacctgattattttatatctaacatatttaacgctttcagaagaatcatccgatttgaaattctacaaatagaattaggattttttttcaagatatccgatatcacgcgtaagcgcagttgtccaaaaaaaacatcaacagtgacacaacgtagtcaaactatttcatactcggctttctaaagtcaccaattacaataaacttctgcattaatcaagtgttcttatcaatccaatatctgcaatatcattttttgaacccgctggattttcagtatatgatctactccattaaaacgtaaatcaaataccaaaatctaaagttactttcttatgtcatttttctatttattgtcattagatcaatcgtgttttattgataggaacatcaaaatggtcaaataatactgtacaaaatattgatagttatcaaagtaacatctacagctaaattttctagatattatattttttactacttaaattatagtaattcaacgtttaaataaaccacatgtatggacagtcgatatattctctaggacacttttattattgttttttctaggaatcacatttatcaataatttcaaagtttatttattgttcttgtactatgatgtctatggacaataatgagaaaaaaaatggggaaacattagatagcgacaaattaaaaaaagaaatgcttaaacctataaccaaatcaaaaactgaagtagacgaagaattaaaggagctagaagtagaaagttcgggtggtggaaaagacggtggaggagggtaagaaaatcaagcctactaatgaaatgaaaagtggcagtacgtgatcatggtcgtttagcaggtatccttttttcgcctaacaaatcgattagttttttctcatttggagttgaatttgtcaatactatttcagtaaatcctgcattttcaaaactggagaactttttgacaccatagtcatttgtgatctgaaacattaactttttcaatatatcgtcttctatgattatccaatcaggtttgttgtactaacgggaatcttacccaatttaaaccacattttattatcaatctacttaatggtaacaacaatattagtttttgatttgtttattgggtcgtctgttcactaaatcaactgctaattcatttagcttagataatttaaatggtttaattaacaatttaatgtttttagcaatgaattttttctcactattaaaagattgtttaactgaatcatacgcagaaatgattagaatggatgcaaatggatactttccaaaaatctcatttgccgcttcaagcccgttcttaccatctggaagtttgtaatccaaaataacaagatcgggtttaaactcttcataatcacccagaacatttgaagcggtcgtgtttgtaacagaaatgtgatatcccttgtttattagaaaatctttatataaatttaacaaatcctgctcatcttcaatgatcattatctttatcacttctgtaagatatcaagtacaacatacattaataaattctaatgtttatattttatagatattttctaatctcagattcggtttaaacagtcaagattaaaaatatttatccatcaactcatcttaaatgattgcataattctgcagccattagtatcaatatacgtttactattcatttctgactaacatttcaactgcaaatcacatttcagaaaattatgaatacattatacgatcctgacaaaaacgaggtattctgtcaaaatgtgtattcagaataaaacacacaggttttggtaaattctatatttctacttattgtttatatttatgggcgtcttgctcagagacggtaaaatgtaaattatgtccatcaaaattagaaactaatgttttaggtatcatatatttagttttgtcaactacgcctctttctgcaataatatagtcttcactaatttcttggacctcccctaaatcataatcattaatccctcttgcttcctttttaattacatctgaccagtttatatccaaattgcccgacacacaatttcatataaaacaagttttaaatagatcatataattggacaaacattttattaattatttcgacggaagataaatctatgctcagatagaaggccatatttttttatgactccatatcgtattaactagatgttttctatacagatttttatagataatgaggcacgaataaagaattttttactatatattgactaccgtcgagtattaatacggacccttaatgattcagaatgggaatttctgcaattataacaatataatagccccataataatccaaaaaatattctatgggcataattctcgaggtgttctaacttaattatttggatcgttgatcaaaaattacatgaatatccaattattttggagttattttcgaatcatctagacaagacttggatttctagcaataaatataataacttcagatacaataatagatcggttgaacacagaaaaagaaagtaatgttcctacacctgccgcctcaaaatctgtggaatatgttcttttagatgggtttataaacgaattatgggaagttgactatgaaaatggaattgcattaaatgtcacagagataataaaagcagaattggcaggaaacgtaataaagtattccggcaagatcgaagatttcctatcaaatgaaagaggtttcaagaaacttcactttcatgaatccgtcaactttccaatgcgagtacattttgagactttaaagtagttaacaataatcaatatttatttgaaatattgcatccatagttatactacatattagacatttagattaaaggtctaaaagataatgattatttaaacgtgttttatcgcaacaaaaatgggatttttgaaaattatgatgattcaacaaaggaaattattattgtccgaatggtgcctgtaattcagctcctccatacgtacctgctgcattagggtcgacatcatcaactggttcttcagttataataaattgtgtataggtatatggatttaccatgttatctgagactttcaagctatttccatcaagtgaacctaggcttaacttgtagttagatccgtctgcgtcaaccagccatgcttcaaagactttatcctgtttaggcgttgctgtcatatttactgaaatatctaatgttttattttgggtatcgattgagagtgtccctatcttttctgtaccaaatccaggaccaggatctttagctttattaatatccatagtcatgggttcggcattggctgattgtaaactaagagtcattgaaaatatagttgcaatcacaattccaaataacgaaatatttattttagacattgtaaagatctattattcaaactataaatagttgatataaagaaagaacacaaatatatttatctaaagaatctaaaaaagatttccaatataggaatacaattgatgctccaccgaagttaccatatagaatatcaaaagaaagatctaggaaaaatgagatgatatattatataaaatatctaaatatcttttacttcttcctttaacttttcttctttgtattcggtgtcaaggccggtgtttggatcttttattttgtttcctatggctttagcaccagcttttatttatctcctgcttcatcaaagccttcttcgacatgatctgcggtatctctcacatcctgttcgacgtcatcttttctgttaataggttcttcggacattacaacttcttgtgtaacaaagtttttatttatccataaaaattgactggcaagatttgtttttccttttacgagatcacagatctatttattccgatactcttatctttatttttacagagtactcggtaatatctatttcagcaactattcccaaagtttgtttgagcaatgatctaaaaaatcctgacagaaactttgaacccttcccttccaatctatgtctaattacaattattttgtactcaccggtaatcaattcatcgtaagttccaatatatccataagtacatactattttttcaatatattccaaaacaccattaaatgtgatatcttttttccaaaatagtatagtatcatttggaatatctttgcccatttcaaggccaaagttatatgcatcatcgtcatttaaacgacataataaagacttgaaaacttcacgatttacaataagcatgtccaattttgattgaaacctcgtaaattcagcatactgcttaaggactgaattaatcatagcatttacagatatacccattcgctctgcctctgcatttagaatttcagaaagggatttatcaatacgaaaggatctgacagtagacgatgggccatccatgatattatttagtactcataccttaaaaccgtaactatttgtaaccatttgtaatcgaaataagagaaatgtgacatagtatacatagatgtcttatatcctgcaagataacatccatcgatgtataatagtttaatagttaaaaatatagaaaaatattcaccagtacacgaacacactattatctatgactacgagaaaggtgagaagctttgtaagtcatgtggcatcattgttcaagataagatatatgatgctgagttagacactgattttcaaaaatataaaagtgatactaacaccgtattgcctcattccattattcttaatgataaaggaatgtcaacagcaattgcagattatgataccagtacatccaaaaggttttcaaataggaaagaacataataagatagaattcttaaataaaattgtcagttgctcaaacaagaggagaaatttgaaaatagtcatagatcttttgaatcgtataaaagataaattatccttgacatcgttctgcatagaagaggcattatcttattacaagaaggcattagaaaacggactaattaaaggaagatcaataaaggaaatgatcgtttcatgtgtatacctagtttgtaagaaaaccaatatcccaagaacattgccggaaatctcccaaatggtacaagctgatgaaatttttgccgccagatgctatcgtcttttaatgagagagttgaaaattacacacgtacaattcaaaccagctatttttataagaaagatagcagacgaggcagaaattagtgagagaacagcaagagaatctatagatatgcttttggccatacaaaatgagaatgtattctctggtaagaattcgctctcaatcgctgcagccattctttacataacatgtagaaaacataaacaaaaaatatcgcaagcaaaaatcgcttcggcagctaatattaacataatgacgctaagaaaaagactttcagaagtcagaaatgtagttgtgaatgcatcatttctcaattaacgccctctttttaactttagtctttttttgaacaattacaacaaatagtattcataatagaatttggtcttttgctaattgtttgttgtgatttgttttgtctactaaaatttcattcaaacatactaatcacgaatatcatttttgtttgactattgataaaatactagaacaaaaatgattcgtttaaataattttcaagatattcataagaagattgacattaaaggaagacgcaataaatttacaccgcttacttagaggtaaaatagagatctcaagcaggatatcttcagataatatttttgaaaattcaaaagaaggccgtggaactttaagttcgatctatactccgggtgtcgcatatgtttcaaatgaaatccaaaagaataaagaattggcatacgactacacctcaaaatggaataatatagcgatagtgtgtgatggaactagagtcttaggactcggcgatattggtccagaaggagcactacccgtaatggagggaaaagcagtcttatttaagactcttggtaatgtaaatgcatttccactttgtatttctataaaggataaagaagaaattatcaaatttgtcaaagctattgaaccttcatttggtgcaataaatatagaggatattgaatctcccaaggttctagaaatagtagaaagacttcaaaaggaaatgtcaatcccaatttttcatgatgatagacatggtacagcagtcattactcttgcagctttaataaatgcattacggatagtacaaaagaactcgaagaacgttaaagtcgtgattgcaggtgcagggtctgcagggtacggcatctttaagattttatcgagggcaggctttaaagagataatagtaatagataagaaaggagccatttacgatggaagagataacaatgataataacaaaaaattaagaaatctagaatcaaacaaacaaaatgatccaaagctcgatagtagtattatcttgaattcatttaagagagaaatagctttaaactccaatccaaacaagatagtaggcaatctagaaacagcaatcaaagaatcagacatctttattggaacatcagggattggaaatctcatgagttcacaaatggtaaaatcgatgaaaagagatccaattgtttttgcattgagcaatcctacaccagaaattttacccgacgaagcaaaaggtgcaggagctagaattatggcaactggtagatcggattttccaaatcaaattaataacgcggtagttttcccctcaatatttagagcattattagatctaagaataagaaatttggatgaaaacatattgatatctgtatccaaatctatagcagacctggttgacattaagcatttaaacgaagaattcatcattcctaaaataaacgatccgaggatactaccggtagttacaaattccttaaaggaatatatcttgaatcaaaatccaagatgattagaacacaatacaaaaatatgatcgtgatttatcatgaaatggcgtacttagatccatcttaagatcaaatttatcaaaccgatattttagttgcaagcagtcatatatcacatatgattataaaatttcattaaattgggaaacatccagaaatcctaatttgatgatccctgagaatgcatcagaccttttaatatctatatgaagagaaaaaagaagaaatgaaatatacagttttggtcactagtggtaacaaaaacaaaaatgtggtaatcttattaagagtttagcttatcatcactaatcatagtagtgaacaaggattatgaaaacagacgacattaaaaaatctcaaaacgaaatcacagataagaaaaataataatcctgatggtttgaatttcaacatagataaaacagttatcctgattaccggtgcgagtgggtttataggaagcagactgttgaatgaattgattgaaaacaaagaacagaaagatgttaaatattttatacgaggtttatctagacataaaaatcaatttgatattgaaaaattaaggaattctcaagtttcagttgaaattatggaaggtgatttaagtgattatgatgattgtgtaaaggcattatcagatgttgatatagcttattatcttgttcattcaatggaagggtcatccagaaattggaaaaaattctcagaaagagaaaagattaccgcagaaaattttatgaacgcggcaaaccaatgtaatgtaaaaaggatcatctatctgggtggattaacctacggtaaagatgatgacctatctcaacacatgcaaagtaggaaacaagtaggagacatattgaagaaatcgaaatcaaaggtaacaattttccgtgcagcagtaattttaggtagcggcggaggatcatttgaaatgttaagatatttggtggaaagattacctttaatggtatgtcctaaatgggtattgacaaagtgtcaaccaatattcataggagatgttataagatacctttctaaatctatcgagataaaagaaacagaaggtaggaccttcgatatagggggtccagatatactttcgtatttagacatgatgaagatttacgccaaaattcttgacaaatctatcaagatactcataattccttttttgactccaagattgtcttcatactgggtagatttggtaacgcccataagagcatcactagcaaggcctctgatagacagtctaaagcacgaatcaacagtaagagacgattcaattctcagaattattcctactgaattaaagccatttaaagaatcattagaattctgcatgaaggaagagaaaaagtataagaaaaagggtacaagaaatttgaagaaagaaagaacatctctgtcaataaactacaagattcttctaatttctttattattactactagtaataggaactacctactattttctagatgatagaaagactttcttgggacccttctggctatccatcgcaatcgtttggtatattctaattctaacagccatatactttgtacgctttggagccaggcttggtgctttgattgctggaatactcgcttggggaactttattcttctggatcttggataatgcgtatattgtatttggacatccaataatagcacaaaagccaggagcagatgaaacatggagagacatgattggaataataattgcaatctttaccatcttatcatcccacaatatctttcacaagattagattacacagttaatttcattttcccgaaacttaatccgaacgaggttttagaatcaatgatatcatgatttattctgaattgacatctcaataataatcatccattagtatacgagttagcactagttacaatgttttagcactatgttaatatctttgtattaacacacaagaatatggttttcatacgagtaaaaaaagtaaaaggctttgattattattatttggtaaagagccaatgggattcgaagagaaagatatccatgcaacatacaataaaatatttgggaaaggctactgatgtaacaattgatagtattcctccagaatataagaataatccaagaatcttatctctgttagcatcagttactcaaaaacatgaaaacaaagtggtcgtaataacagctttgaaaaaaagggtttttgatgcattaaagaatggtgatactgaaaagatagcaggtgttgcaggaaaatacaaagaacaggcaagcttagctgaattttatgacgatattctaagacccgttctatatgacattgggtatctatggcaagaaaataaattagatattggaatggaacatgtctgtagcaacacggcaaacaaaacaattcacatgatcacagattcaatcaagcctaacgataaaatggagaatattatcatatgtactcctgatggagaacttcacaatatagcctgcaacatcatagaatccttactatttgaaaaagggtttcgagttattaacgtatcaccatcaattcccactgattcaatgattaactatattgatgaaactaaaccatttatgatacttatttcagttacccttaaagataacatagggtcggcagtaaggctcataaaaaagaatcagtacaatatttaatattcctatcttggttggaggactagccataaatcatagtagcgatattgaaagaaaaaatatagaagctattagtcctcatgtcagaataattgtaaactctccattaactgcaatcgtaaaaaccattaaaggtataaccaagagtaataacacaagaaatattaagaagtttgagcaagagttggtagtttaactaaaaaacacctccttcagtaagacactgatgggacaatagattgaaaagtagatcaaattgatgaaaaattaaccactcaacatttctttatttatagagaccaatgatcataatcatcatgcatataatttgtataaaacgtttttagatacatacacggattattagtacaggaatctgtatttcaggaactttgtcttattacccgtaaaggatacttgcttgttcttagttgcaaaatattagaaattgtcgccaaaatttttcatattggaatctacctggtcttgagtatttgcagtccctttctttttatgttcactcttatgaaccctagtgtccatctctttttcatgttcttcacgtacatgatgtaatctatccttttcgtgaatgaattctttcccacatttatggcattttaagatcaacttatgatgtactgttttataatgattcatcagatcttcctcagaactaaacttttccccatcaacttcgcaagaatatttattatgaaagaaatccacacatcttctagtcataagatattattaagttcttttattgtgtatttgtggcagaatatctacaataagaaaaaatcattatcaatggtatttcaatttatgagattaaatctctgttataatagtggatttgtcaaattcatgaaatgagaataaaaagggtttgtggataaagtcaagtatcgtatcagactaagaattcaaaatattctaaaatattacatgaatagataaaggatcagcttatcaggttaattatccaatcatacataggaatattggcaacagctatgaatgacattctagagtttacagaaagattagtatttaattcctttccagaagtatcaaaaattaatcctcctgcttctttagctattagataacaggcggccatatctattgcccttatcttgtctcggatatcaatatatgcatctatagaaccacgtgcaaaatagcacaattctaatgcatttgcacccaggtgcctaacgtgactaattgacgaaaccaattttgaaatggataaaaaatggtcttccgatagtccagaaatattcaatccaatcaccatttcttttatagaaagtgaaggctccttagcagtatggatttttttttcattcaaaaatgagccgatggacagggatgcatggtataaatctccagatactagattaaataccacagcatcagtaacagattttaagttagtatcaggagaataagcaagtgaacagcagtaaaatggcaatccacaattagcgttggttgtaccgtcaactccatccataacaattagtccactatctttgccttctataaacccgcattcttctcccaccacatcaggattaaaagaattcttctttagaatctcaaaaacagatttttcggcaagtagatcaattttagtggatacatcaccgcctgcaccgattccaaactgttcttgtccctcaacggttccaatcaaatcatgggtattcttataaacattaatagcacattcttttaatatatctaagatcggcacatcgaatcacaatgatcttattttaacaagcaaataaaaactatgaaatcaagattcagggtgaagacaacaaacctagaaaattagatacaagaatatatacttgatcaagacttgaaattaaatgttatttattcacatggctatgaaatattcttagtatcgataactatattgtacaatatacatcaaattagaagaaaattgtaaatttcatctatcaaatgattgaggctatgagcagattagcctcataggtcatcagttttgtctatagattatattaattaggaccttatgacaaataataaaaactccaatctcttaattactgtataaatgcgcagagaggtaaataaattacagaatgatttgacgactaccacgattacaaatgaggagcttttaggtgtggtcataggcgtaactaaaccaggatacattacttttgaaggtaaagagcctgtgggcttaggagaatacatcacaataatagaagatcttcaaaaaaggattcttggtgtagtggaatcatgttctattaagagcgatgcgctagatgagatttctaactttgaagaagctctagagagtaaggtcgtagctgaaataaacaagagagataagagctttaaggttaatgtaaaaattctcggcatgcttgacttgttaaaaaaatcaaaggccatcttaccggaaataccaccactgccaggaaccgaggtatatagagcaaaaaaagatgatctaaaggacatttttgattccgaggatgaatcatggctaaagatcggtactctcttaagaaatgcaaacgtgaatgtcagagtcaacatcaatagacttacaactagacacctaggaattttggcaatgacaggtatgggaaaaagtaatttagttagtgtcattgcaaaatcaatagcaaaaattccgggcactatggtgatctttgactatcacgatgaatatcgctttctacagggagagaacataaattttgtacaagctcagataaacccaagattattaacatccgataagtttggagaagtcatagaaataagagaaaacgcagacattcaaaacacaatattactaaaggcctatgataacgatgatctgaaaaagaaaataggggacgacttttgggaggaattagagaaaaatgtaaaagacataggttttagggaaaagagatttgcaagttctgcagacagagtattagacaagatcaaggaagctaggagaagatttgatagcattttgattccaaatgcatcagatcctgtttctcaaatcagagaaggttgtataaatataataaatctaatagaatttactgagaaacaagctaatgtagcgatatcgttttatctcgaatcaatcctgtatcaaagaaagctctcaaagagtctgagctttaaatcaaattacggaagcactgaccaaatattatttcatagtcctgttattgtggtaattgaagaagcccatgtattcatgcctaagaatgagcataccgataccaagtatattgcttcgaaggttgcaagagaaggaagaaaatttggggtaggactaataatagtatctcaacgaccacgaactttggacccaaatgtattaagtcaaatgggttcattggcaataatgaagttggttcaacaagaagaccaatcacaaattgaatcatctagtgaatcaataaacggtaagattattgaacaattgccgtctcttaaccccggagaagcgatgttagtaggacagtgggtaaatttaccttcatttataagaattgacgaaatagttgaaagaacaatgggaaaggatccagaaccagtaaacgagtggaaaaacaacaaagagaaaaaagatatgtcaatcgaggacagtcagatgtatatcagagaagattacatagaagaggaatacatagaataatatgatagagttaaatacataaatttgttaggctctattccctatctataataatgaacatcgccatgattaccaaaactagggaaaggatagatttaaagctatatgatgataatctaaaaaatttgactaacgagatttttgaggatatatatacactgaattttttcttacaaactatcccaaaaacttttggtcaagacaagacgcttttgatttttaacgatttggaaagaacaaacagcgttttggacctaccagataaagatgcaaatccagaaagttatggccacaatgtaaaacttttactggccaaggatgaaaattcctattttatagaagaataggcaactcttttacttgacaaaggatcataatgaatgagagaaggctaaagtcatttattttctacgtttcaggattactatatttaaaacattttcttgctattgaaaccttgcttatagagtgacatattggacattcagcccagttttttcctccagagtatctccaataataattacacttttggtacatacattgaatccaaaatgttttttttggacccttcaaccagttttcttgcaatggtttacgagttcttcgtgccgctctaggcaaacgagataatttcatggtgtttacgacatctactatatttgttcatgatctattaatcttttctatacatgtgatcttggagtttcaatattgcaaatgcgaatgagttcatacatactctaacgaatttttagacaacactcacactggaacccttctcagtcatcttgaatttatacacttgttcaacctcagaattttcaaatatctcttcatcatgagtaataattatcatttgggacaacggactcatacctttgctaaagacgtctgaaataatttttacaaacgatcgacgtctttcttcatccaaattggtcgtaggttcatctaaaactatgaaatcaatttttgatgaacccatcaagaatgcaatccccatcctaatagccagtgatacagcgactttctcgcctccgctcaatgatacagtatcaatttctcctcgctttccataacaaagtacctttatttctcgtggtttttcaactaatgtaatttttgaaagtccaacgttgaaaatgttgatgtattcagaggctttagcagaaatcaagtttaatgctcgtgtccttaaacttgaactcacgataccatctctgttaaagaccgtggagcgaatattttcaagatctgaaataaattttgcggcagacgataactctataatcaatgtttgaaattccaaattttctctttgaatgtctacgattgttttttccaatatcgctttttgattgtgaatactgaccatttccactgaaagcttgcttttggttaattttttttgttgataagaatttaaatcaacctcgattacatcatttctcatattttgaataatatcaatcaagtttgcagaatattcatctaatttgtatgcggatagattgatatttattaaagtatccaattgtagtttggctaggctctgttgatctttttttagattctctagtttatgctccaaggtatcggtactaccatcaacatcaaaatcataatttaatagagtacgctctgcagatattatatttttctccttcctcttgaattccatctcctccttgtttagtttggaaatttcagagagtatagactgtttctctttaatctttttgttgagttcagaattaatatgagaaatatcaaacatttggttaagcgacatgatttcagagttacaaacaggacatttgccatctttaatttggattttttgagcacattctgtaaatcctcttaactttcctatctccccctctactttgataactctactatttaattcatctaattcggaattgaccatctgaatagtgatatagacttcgtctttgtccctcaaaaatctaacagcactttttatgtccacaatcattctttgtgatctatcaatttctgttttcaaagaatttgatcgttctcggaaatattttaataaggtattttctaaagaatctgatctcagaaagtttggctatttttggctcaagaatttcgatttgtttttccaattcatttaatgtttctgttttttgagataattgtacgaggacggtatttaacgtttgttttgattgcaagagtctagattcattatctttagttttcttaatgagaatgtttatttgattatcgtcataaccttgggttttttctcgtagtatttttctaaattcttcaataacagtatgcatattattgaaagatttatccaatctatctaatccaatcatgttatttagtaattctttaaattccctaggttgtgaatctattattttactaatttcaccttgttgaataatgccagctatttgcaatttagtatagttaatccccattatagcctccgtttcatggattactgattcaccaagttgctttcgttcgccagagatcattggtctgtagatggatttgttattttgatccatctccaaattattgttgccacttttaatcacctgttctaatttaaccgaagtcaatcggccttggctatctatttgtcttttgatcctataatttgtggacccaatagagaattctaaaataacatacgatcccgtttcattattaacatacccacccattcctcttgttagcaaattcttgttagatttgcgagtgtgttcatcgaatagggcaaaagttatagaatcgataatactggatttacctgaaccgttgtgccccacaaaaactgtaatgccaggatgaaactcaagaatagtatcggtgtgtgacaaaaagttgtttaaaacaatcctttttatcaatcttaatcacctttcccatcaatgtttgattcattcaaattttgataggttgatttgttattttcaaaaaacttccaaacgtaattggcaatttgattatttttacctttatcaaaattgttattatcgttggggtcatccggattatgaaacatattgattaagtctaatgatagatgagtcaaaggttcagaatggagagattttagaattaatgaagacatctctttatccatgtcaaaatctccagatctatcataagaaaatccagtggcggaatcttcgtctaaaatactccagttataatataaaaatgaagcccctaattgtaataattgtctagataagattttgggatctatatccgctccacctatttttagatcaataacaggtttctttgtgtattgagtagattctcgtacgatattacccagtttagtatccaattcgggatattctatctggtattcaaattgatgtcgtctcttttctagctttatccaatgagtattaacgtttgcagagacttccgaaagatctactaacagaaatcccttctccacgtctgaaatggcttcgttatgtcctagatcaatggaaccaggataagccaccataccttcgtttagagtaggaaatcttttctcaatatggtcatgatagtgacccatagcataataatcaaatccgactggtaaatcatgagaaaaaatttcgcctgcaaatttattaaaatcatagaggccttgatgaagaacaagtattttttttaaccaatgattttggactgaatgtttttggatgtcatttttcatggtagactctaattttctaaatggtctaatcaaaccgttatcaatgttggaacgacgttccttattgaatccataaattagtagattttcaatttgaaccggtgattcgggtttgagtcttcttgctaaccctaaattatgaaaaaggtatggcagaggtacatcattagacctacttatgtcatgctcacctaatacaaaaaatactggaattgatttttcttttagtttttttaattctcgggcaagccgaataatggccgcaccatttggtttaggattatgaaatatatcacccgctaaaatgatagcttttacgtgctcactaatggatttttcaacggcctctccaaatacttcgtaaagatcttcttctcgttcttggagattgaattgagcatagcccaaatgaatatcggaaatatgagatataagcaactatggttcaaaagatcaatgccatattttatttattaattgaaatcattcttaaaaagatgcattttaacttaaccgccacctgctccacctcccaatgtaccccattgaacttcttgataattatcaattaactcatttaacaaatcattgatatccttatcttgttgttttgaagaaatatactcgcttagcagtgattggagtctcttataagtaatgtcgtctatttgtagatttctcatttctacctagactatcatgagaatttaattatagatatatatttgcacctgtgttcaaagaaagatttaacagtaatataatttacttaaaatcataaataatgtcgattaattatcctacggagattttttcgaacacatttggaagaaagtttctcctaaatatactaagatttgataacggttattttatttcaatatcagagaatgaatcaaagcttggatctatatcggtatctttagctgtgacaaacaaatcaaatacggccagagtgattcaagacaagaatgatcaattattcattgacaccctttctaccagaatttccttgatgaaaaatggaatctgcataatatcaatgttcacaaaaaataaattacatttagatgacatgaaagtaattaatgaaaagatcctttcggcaatagaggagaagtaaatggtaaaaaaagaacaaaacaacaatgatcgaaaggttattttgaagaacaacaattctagtaactcttcaaagtccaaactaaagaatgttgaaaataacatcagaaaagatgactcagaattaaagcatgaatatgatttaagaagctttttatcaaacctcgagaaaagaggcgaattaataacaatacacaagaaagtaaaaaagaagtttgagcttgcagcaataataagtaaattcgataagaaagaggctataatgtttaccaacgtcgatgaatctaaattcaaagttgtttcaaatatcttgggaactagggaacgctttttttatgggattgagtcttcaaccccaactagcaaaatcgatttatctaactttggaaacattggatcagaatattatccaaaagaattttcaaaagatgcgctatttaataataatagtactagaaatctttatgatcttccaatcataagtcattttgaaaaagatgcaggcccatttatcacctcatctacagtatatgtaaaagaccaagagaatggaaatcaaaattcttcagttcacagaatgttactgctaaataatagccaaatggtaataagaatggtagagggcagacatcttcataaatgcttcgtttacgctaaagagcataaagaagatttgaaaattaatgttgtagttggagtgcatccagctctaaatattgcagcagcatatcaagcagcatatggaattgatgaaattgcaattgcaaattatctcttgaatggaaatctaaagcttgcaaagaatgattattctgatttaatgataccaaagcacagcgaaatagtaatagaaggcaagatacttcatgacgaagtatccgaagaatggatggtcgagatgctgaggacatatgactttaaacgaaaacaaccagtttttgaaattaataaaatttggtacagggataatcccatatattatgatatattgcctggatacacagaacacaggttattaatgggattgcccatcgaagccaaaatttttagttacgttaagaatactgttccctctactagaactgtacacttatctgatggagggagtaactggttaaccgcaatcgtacaaattaagaagagactagagggtgaaccaaaaaatgcaattttaactgcatttgcagcacacccgtctcttaagactgcaattatagttgatgaagatattaatccctggaatcctgtagaagtggattatgccctttcaactagaacccaagcggataaagattatctaataataacaaatgcaaagggttcaagtttagatccctccagtgatcaaaccaatctattaactacaaaattgggaatagacgctacgatttctcttctcaaagataaagagagatttgagattgctaaaatacctggtgcggataatatcgatatcaaaaagtatgtatgagaagaaaaagatagttacttaaaatcatgaagttctaaatctgtgtattcgtagacagaaatcttttggcagagattaattcaaaaggatcagaagtactctaaattagcaagaatgaaaaagaaatttagaaaatatgtattataagaacagatagaatcgcaccatacaataagtggccaattaaacttgtgatggacggaccaggtcctaatggatgtttaaatggatcaattccggttatgggtttgtgaattggcagtagcgttagaacccataaaactagaccaaatatgatgcctacgaaaaacaccatggtgcttaagaatggaaccaaagtcagtaaaaaataaaatccaattccccccaatccaccatttacaaaatgaagaaaaaaaagtccaggaaaattaatctgcgttccatcagttctaaaaaatttgctatataacacctgattttcatgccattcaagaaccccttctagtccccattttctccacaaaggaaattcgaaaatacacatcatcagtgtagaaaataaaccagccagtaaacttaaaaacatggaataatattccatcatgaggttatacccaggttatatggaatataatgtattatctgaattgcaaattagttggcattagatagaaaatagaggattctaggaaacaagtagacgccggtaattatcattttaacattgtaagacatatggtctgaatattatattgaatctcaagccaaaatatcaagagatcttatgttaatttgcatcggcaaggagaacctgcctttatcaatcagccagaccatcttatcttatcttatcttatcttatatctcatctcatcttatctcatctcaccaaaacaaatcatggagaaatgtttgatattctatcggaaacaaacgcaactacaaaaatcacatgtctttgtttgacagtctctacaaattatcacctatatggtatttacagcagaaatgattccaattagaactttaatatatctatgggcttttaaatatacaaattattgattgcttgcgggctttatagaaagattgaatccatataaccttagcaaaatcaagttttaaccaatcaagtatcaactaaagtaatatcaaaaacaatagcagaagcaaaaaactgtatcataggtgaacaaatatgagagtaatatagaagaataaatactaggaaattaatagtttagtatgaaccgcctgatagtcgaatcctacaccaactcgacaataaacacaattttagatgacatatctaaaaagtatcaaatcgatacatccaaagagcaccttgatgaggatattccgattaatgaaattaaattcaaatatagaacttattctgaagtggttaaaatgctctacaagagtgcaggcgtagtcaacgcaatttaggttctaactttcattagttttatatgaccagtagtacaggcttctgaaccttcttcatgttcgtgcaaaagcttttttgcattttcctcaggtaatttttctgttgaaatataaccacatttttcacaaataacaatatagctccagccaaccaaatagatttcattgtagttattagccttcgatatttatctatatgtgcaaattaccagataagaatctggaagattaccacattgatgatttgaaaaagaaaatacaatttaaaccaaaagaatagggattaaaaattttggaaatctttgtagatcagaatttatttttttgaactggataataaatatgaccctatgattgaaaatgatagagggaatagaattacaaaagacagtggtttcaatttaatcgagttttggatcaatatatgataaaatcttaaatagattcgagtctgctatgtgtaatgagttgcaaagacagttttattcgatatcccctactattagtataataaccacaaaaaaaataaaagattgatcatccttttgtaataagaaagctagataactatttgaagcaagtggtaaatagcatatcttttcagtggaaaacatgggtaaactaattactggaattctttcagtttttatagtaacaggcatattgggtgtttacatcccaaatgcagtggcaacactaggaacaccattggaaatttgtagtggaaatagtgcagcaggccaagcaggtaatagtgctgcggaacaggatacagaactaggacagagcggtgccacaggagcacaatctgtttccccagaatttaatgcgttaacaggaaataaccttggtgttgatgcacatcaaaatggtgaatgcataccaacttttgaacaaccacccaccgattcaacggtcctaactcctcgaaattaaagagatagattaaggcgcaaagtcaactcatttaataaatgcacccaatcttctttttttcttttttttgaatcaattactaaatcaattctaaagaatatagtggatattcataacttgccaacataccaataatgagaaagatctcaattattctaacacaacatgttttaaaagacgtgaaagagatttgtgaacaatgataaatatttggaaaaagatatttgatgaaatagatgttataaccaatagcagaataatttcagaggataaagataaatcaataatcgaaagagaaagcagttggacaggcaacattaaaggaatagattcgtttccagatggtactgtagatggtcatgggcgttcagttatttttgaaaatggtgtctccatatccaactggcaaggtattttgaccataaaaaacgggcaagaaatatcctttgttggaaaagatacaagcaaggatggcaaatactatgtactaagaacgtactttactcacaatgaagagctaaaagatcttgacggcatggtttgtttcttagacggagtatttgattcctaaaacaaatcatatacttgtagtggatacagattaatctaataatgcacctgatttgcagcttcactcgtgtgatgacgacagcaggtattctatattattatctagatcaataaataatctcaaggtaagcaagtgtttgacaaattaatgctcaaataatgaacgcttttttctgagtatttgtcttgacttttatcgtctttgctagatcaagatcaagaaattatcatcgtattagcaattctagaccggtctgaatcacatcataatgtaaaattaggacaattacatccctcaaccttgcaaaaagggggagcattgcccatacccatggccacatgaacggatttcggatggttgcatactttacatgttacaaaatcttcaggtctactaatgctcatgtatttgattagttattattttataaaaagcataactatttcaagtataatctaccaagtctattaatcataaattgtggtgcagatcaataaaccacaaaaaaaatatggttgctctagtgttcttctatctattttccgggtatagcccgaacatgctgccctcaccatctaaatatatttcataataccccatattctggatttctgtttttggtacaatgatcttacctcctgcctgttcaattttttgtatataatccgctattgaattaacagtaatgtaatttgtaactttgtgttcctgagattgtctttccatcattcctccactcaatcttttgttcccattctcatcttttgtctcaacaaaaccagtaatctttatcagggttttcaggatttccctacttctccatttcccatccaaatacctttatagaatttccttgccctttctacatcaccagcaggaaattcaaagtgttggatattaggcattgagtcctgtctcatttaccatcgacattgtaattttctttttatgtaatgaagaattgttcaagtaatttttacaaaatcaataccataaaaattaggatgggatcaaaggtataacaattagaataatacaaattcccatgcaccataacattccccaacacctactcaaaaatcttgaagttagctttattccagatggtttatgttcaaaccaattcattgagcttccctatttatttcagttttttacataaaatactaaaagggattatactataggactagtttaaaaaaaaatttgctcgataagtcgggtaaatatctaattccaagattagatgctcttctcaatctttttattccgttgtgttgttttctttcagaaaaaaggactttaggtaccgtcgtcgaacttttcaaacatcatcaaaagggtctggcttggatgattccttattggaaatattctctcaacaatattttattaagtatacattgtgaaaattatatgacaaactaaattttaagatataaagtatatgataagctatggaaaatgtaaatcctattccaactggatacgacagaataattcctcatatttttgtgcctgaatctgcagctgccatcgaattttatactaaagtatttggtgcagttgaagaataccgtcattcgattcctggagataagagtaaaggaaataaagaaaagattgttcatgcggtgataaacataggaaagtcaaaaatcatgctggctgatgaatttccagaaatgtgtaatgaacacgtcaaggtgggcgaaaaaataggggcacctagtacgataggaggtaattcagtatttcttaacatgtattttgagaatgttgatgatatctttgaaagagctaaaatggagggagcaactgtgattatgcctttaacggatgcgttttggggagatagatatggtcaatttaaagatccatttggacatatttgggaagttgccacgcacaaaaaagatatgacaaacaaggaattagaaaatgcagctaaagaattctttgaaaaaatggcaaatacgagctaaggaacatattttttacctcaggcataatagcaacaataacaacaatccatcacagacaatacgcataaaggattattttaaaccaatcctttcttgtcgcaagttttaaacaaatataacattacgctaagaaaatgcttgagaaataaagcgagatgacatttctccctcaaatagacagaacaagtagtaaacgcaaggcccatttagatagaaataacgatttgccagtatggaaaaagttataaaaggaattagatccaaaagctttttttctgatctaataattatgcggaggcagtagttactgcaggttgactatcaaaaaagagagccgacgaagaagataaacattctctctcagcaccatcgccactttcaactgcattgacttgttgaactgtagaagatatatcgattgttcccggggttactgcaactattgagaacaacactacggctgccagaaggccaagccccaaaatttttggactattcattatataaatacactcatgccaatatttaaaattgatggcaacggaaatagggtctccggcctacttggatgctataaatttctaaataattattttgtctgataaatgataagtggtaagtggtattatgactctttgagtttcctcacataagcaaatctattacaaattatggcaccaaacatacaaagtccagggttcatgctagctgttttagtcgggaaatgaaatcggatagtttgaatggcatggttagaatatccacctcatctatcattgcagaccttaagacattctttggtaagtattccaccggagttgttgtaaccataagtattctttgggtaggatttatatcgtgtatcttttttgctaggtcaaggccgcctaaaccttttaggtgagtatccaatacaaccacgtcgtacggtctacccttgttttcattctcaagaaaaacttcaagggccacctcaccatcagcgactgtagccgattttactcccagagtttccagaaatgtcttaaacaaggatagaatatctggttctggttctgcaattaagatttggtcgggttcaaattcttttgataaggaattattggacttactatcttcatctttgcttgatgttcttttgtattcagtggataagctggaatctgcaacggatgcagctgaactatgggttttgtctttaaaccaagtaatttcagcataatctttataaggtttgttcacaggtttttcaaatggttgttccttttctcgttggatttcagattcttcaaagtacataaccatttcattcaccttagactacaaagatgtaatcaacataccttaaatacatcgttttaagccaaatcatctaatttgttctgatagcatactgccaagggtgaggattacttttatggtggcattaaatatccatacccaaatttttgatatacttcaatacatcacaatctttcaaaccacacttagacataacatcaatcttaaatttgataaagcgaaatgaataagcattttaatacctcaattgaataacactagcaaactaatttaccaaatccttcggtgaagattagttatatgactttaaatgcccaaagtttacaccaacttgaagggtttgcaatcaaaaaaaataataatttgatttactaccgcatttatacgtgaccattattacagaccttatgaacttgatttcagtcttattctatacaaacaaacatgtgctatgttgctccaaacctcaactatcatgataagattgatcaatatataatgcttgaatcaacatgaagatacattttacattctagacagatatttcccagttggatagatacagaaataaccacaaaataagataaataattatgtgtagaccaccaaaataatttagatctgtgaataaagacttagaaataacaaaaagtataatgacccatatacatctgatcttaggaaacgaacctaagaaaaatcatacatttaattccatacaggagttatatgataaaatagatgcgagacttgaacccaacgatacaaccaaagggacaagttatcatagaaaggaactattatatacatttgacaaaaacattgaatggatgaaagttagaaaaataattatttttgatcacgacaagaaaagtggcattctaggtattaaaatagataaagaaaagttggtgaaatacattgtagatcctgagacgcctttgatagaaacaaatgaagataatgatagacaaaatggacaaaatatggtacagtcataatcattacaaatgcaatatcatgaatttgttgatgctttacaccacaaaatgtactatctttttgcaatggtcaataggtaacctaatcctatactattgtcatagacatatggatctatcactttcaagaaatcatctctaagtgaatcggtttcataagaatcaccacgtttctttaatagttgaatagtattaatcaatggtccatattttgtacttgtactcataaattcccaaaagtgatttggactaagaattgggaaaagtaccgttcctcgttcaaattgcacttttgttacctcatttaatcttttttctattacttcaggaacaccccacagtattggggagggcgaactattgactggtctaggtaaatgtttcccatttactttaaatattgatccaatcgcaagttcgggtggccaagttgcgaatcctattctaccacctttctttgttactcgaatcatttctttggcaacgaggtctgcctgaggggcaaacatatgtccaaaggttgaaagaacgacatcaaaggattcgtcctcaaatggtagattctgggcatcaccctctttccaagttatcccgtcgacctgtgctattttcgcttcttctgcggcgagatctaaaagttcagtcgttatatcaattccggttacatttgcacccattctccgggccgtaattgcagtgttaccatttccgcatgcgatatcaagaacatcctctccagatcgaatttttattgatctcaccaggtgagaggaaattgaaggaagcattgtagaaatagtacggtaatcacctagtttccatacattctctgttttggtttttttcaaactttctttgtcacttgcttcattctctttatttgatagatttagttgactcatattatgatatcacgatatcactttataaaaagttttctattgatgatatctagatatcagaacttatattgctctggaggcatcataataggatatggctcgtaacatgataatccgaggcttcgacgatgagattcattctcaactgggggatcaatcaaaaaagaagggtgtttccataaattcaattgtaaaggacgccgtagatcaatggctaaaaaaacaggacgaaatcccaaaacgacatcatttacttctatatgataatacagagtctgttatccgaatgatcaagtcattagataaattggccaaggaaggcgaatggtttagatgtttcgtctcttcatcaaattcttcacttaccgaggtgttagaaaaactagactggtttgacgggacaataacaccgtacaagtcgtcccaaaaagattccctgaaacacatcaaagacatattgcaaaacatttcccagaattctaataataaagaaatatgtttgcttgatttcctcattaatgatattgcagactcgtcagtcaacgaagcatgttatcttgaaaaagaatatgacaagaatagattagagggcctggtattttgtgcgtatgagttaaataatctatttaaagcttctacaacagaaatgatagaaatgttcgagttacatgatcaggtatttatcctcaataatgatcaaatttacaaaatgcatttgaccaaagaaaatatgcataaacttttcttgagttagtaatatacacgattaagaattaaacgttccttactatcgatacgatatgaatgaaaaagaagttagcgcagaaatcaaatataaaacattaaggtgcaatcgataattaaaattatcatatttgatctaaaatttgaataccattatttagaaatagtaaaccattattgttggaatgttaattcaatacaaacatcaaagatcagaaagttcaattatttttaatagatggtaaaagcaaaaaaaagatttattgttggcctaatgccaatttgcctaattgttcttgtaattgtattcctacattgttacatgatgcgaaggtgatttcaccagatacacattgtgcattctgttcgtttgattgtccttgttcgattccctgctctgcttcgttatgtttacctgttgcaaaggccatgttatcaccaaaggctacgactgaaccaacgagagctgcagcgataaacatcattgcaaatactccagtcttactagtttttgttatgttactcattataatcataatgtatagatgaaatttattatatcatagtttggatactcattcctgtcatatttctataaaatacttaaccagtaaaatattctgatatataattttgtgaaaatgtagggaccataatgcaacatagatacatcgaatagtccactctatcaaatcagcataccaaagaaaagtataattgaagacctccaaattaggtttcattactgctaacttgagactgcctcagactagttttataaattatgatcgcaatactatatcatataatggaattaacaaaagtcgagagagaaaataaagtgtatgtaaatgataaagcaatagttctggacaagaatactattactgcatctgaattattggaattagctggattttcatctctagcgtacaatatctacctagttctagatagaaagaggaagaagatcaaattgttgggcgaaaataagaaaattaagattgaaacagggatgcgttttgatgcagccttaaaacagaattagttatggtatcatgataagatggaacatgctttagttccagtatttcttctattcaagttatataagaaaaattagaccataattataccttagttgctacagtcagcaaataacctaatcgcactatattatcatgtatgtatggttccaaggttttaagatagtcttgtctaatcaattctattttttctattttattctccttttcaagtcctcgaattaattgaatcattgatcctgattttgttgccatctcctgccaatagtgatttggactaaggataggatattcaatggtatcattttcaaaaaatatatccttaacgtcgaataatagttcttggatgttgcttgggattccccactgcataggggacagaggtggtactagtgattggttgttttgaacggtgggtaaatactttgagatcgttgcatacattcttccccatgcaagttctggagaccatgtagcaaatcccatgcgtccaccttccttgagaactctttgcatctcatttgccgttgctttttgatttaatgcaaacatgtgaccaaatgttgataatacaatatcaaatgattcatcttcaaatggaaggctttcaacgttaccctctctccattcaatcccgctgacttttgctatagactcctcctcttttgcttgtgttaaaagtttaggtgtaatgtctatgcctgtcacctttgcaccggctctgcgtgcagttattgcagtgttaccaaatccgcacgccacatctaaaacagaatctacaggtttaacattaacaagtcttactagcttagcagagactggagaaattaccttgccaatatttctataatcgcctaaggtccatctttctctgatgccctgatctgaattattcaatttaaaaccatacctcagtttagtctgataaactttaatattgtatttatgacgatatatagtaagagagtctataccatatattcgcgatttaattttccattgctatctacaattacatcatggttatgaatgagtcttgaaaggaatgcattaaatggatattgatcaagtaatgactttgggtatgggcatacataggaaccgtcaaaaggtttttcgtgccaccagttctccagatttatgcattcctcaaaatgcttgttcttaagcagcaatgtagcacaatctgcggttaaacgtatatgcttatcttttctgtttgtgtctttattggccttaaaaatcatttcttcttttaatttattaaaagattctaaatgtcctaccatcgcattaacataatagggtaccaagtcaacaacaatcagatttcctttttctaggttttcttgataatttgtgatctgtgatgaaaagttttttaaatagccttcatttgctaaactaacagaggcatgaacgcatatctgacctcgctttaagccttcattaatatatgccgaaattgccttgtctaaatcatcttgtttattatacaaaagtatgacatgcatgttggtactaggagtaatcaaagcatcgtagttcatttcatttattagagtatgattctttactaatgtcctaaatgcttctggacttatctcttgcatcaaccctatttcataagcacacaaagtatttgctggacgggaagcaccttcttgtgttaattcataatggagcaacgcatcgtaatatttcctctcaaaaaatggtttcatatcgtaaaaagctcgaaatatttttttgccttcctttggtaaaataaaatgattacactcactattacctttattctcaattttagcatctttgtgaatcggggaaagacttttactcactgttattcctccagaggacgacaccctacccatttctaatatgtcgtcagaaaaataccactgagtactcgacatgatagtaattgtcccatcatttactaaggtagagatattgaatcgatattgacaaatcttttttagtctttctataatttcttctttaggaagatcatctgttacaaacaaaacagattcatcattttccaaaccctcaatcaaatatttaaaaccagcatctaatttctcttgactattagaataaatggaaaatgtatgtgagataatatcactctttttgggtttatatacattaattgtcaagattatacactattctattatgatcatgaagtatatgagtattattaagaataaaaaaattagattcgagaatgctaaaaaactaagtgacctagcatacccttaactatgtttacttttcaatactcgcgttattatacgccttcgccagagcttgactattcaaaagatccccttgatttagattttgacttggatttccaatagttgaaggaagattggtaacctgtgtttggctcgttattatactaccaaaaggaacaagcgtattgtctggaatttcaactcctatcacaatgctgccaagccttatgacaacattattacctatttttgaatcaagtactgcactttttacacctactatggtgttatttccaatccaaacaggtccgtggactattgaatcatgtgctagactcacattgccactgatgaaaatagcatatccctgatcgaacctcgtatcattctccagtaatcgttccccattctgagagaaccttttgttatcattatttactccatctttaacagcttcaatggcatgtagtatgaccccatcttggacgttagaataatctccgacatgaattggaacaccttcatcggccctgcaaaccgccgttggagccattaatacttccttacctataaaacaatcacctatgacaactgcaaaaggatgtataaaagctgaatcatctattttaggagaggaaacatttgaaactacaaatgtttttacattagacattatgtttggccattggtttgttgctcccgtgtcattagtttctttacctattgctagtagtccctgatgaccaacaaagacaactatccccattactattagcaaggtcatgactgttacccgtatagtaatattcctgtttgtattaaatctcattggatcaattgtatgtttcaaatgtatataaacaaatgagttttgacggattattggttaaataatacatttccttttttagatttattcgcctcaccctttttcattctcataatctggatccttaaaaaataggaaaagccttttttataggtatggtaatcaaagtaaaaattcctatataaaaaattacatgcagaatttgaaccaaaattatcaaataatcaggaaataggatatcttgatcgttcataatactactggcgatctagttatctatgatgatcaaaatgataaattattagtctcaatcaatactaccttttattcaaaatcgatatcagattcattatgcccaaaatcttataaaaatacaaaaaggatttattgcattgtgcatcttggtctcctccgtaaatgtgattacgaatgagttgagtccagttgaactgatttttgctcagaaagaagataacaatgtaattgaacaagaaggggatggaaatgacgcatctcaaagtgaagaagattctcaggaaacagatcaaaatagtcaatccatccccataattttatcttttttagtaaatgacttttttggtgatttctttatgaatagtccctaaggaaggaattcttgaattgttacaaaggaatcttctattaccaattgacaatctaacacataataccaatcaactaatagtaatttattaacagatctaaagtactctattttcattagaaagtttaaaattcactctttatatttaagatcatttcaaaacatcatcatcatctgatggatacgcatataatgattctagcgtcaaatataagcaacatatctaaatatcaaatttgggtttcacctttttttgaaataatactcaatttttttaaagtaattatagtttttagtacatggaagccagtaaattaattatttataaggtcaattaatgatatttagggtgttttttttgaattcttcctaattactgtatattaacggctagaataatgttgtcttaaatgaaaatacttatttacctaggacttcgataaaccgtgatgaacaaaattagaaatttaagcatctttattgtagcattttctgtactgatgattggcgcatcagcagcatctaccataggttcaattagtccagtatttgctagtacagacaattctaacaatgatgatcaatctaacaatgatcaatctaacaatgatcaatctagttcaagtcaaacagctaatgaacaaccatctttagaaactgtagacactcatttggaaagttgtattcaacagatgcaaaatgataatactgatgaggccttaaatgattgtcaaaatgctgatgatgagttagacagattattagctaatgcaactggatgatgatgtataaggttcgaaatataacaaattcgtcttaactgaatgaaataagtacaacacattccttaatttttttattaccaatcagagtttatgattattaaaatttatacaatgcctgcatacctactaaactagaaatattgaggtaacactattagatttgatcaaaaatggtactttattacaagggaacgataatgatccaaatgatactttttccagtaatccatctataattgaaaaccttaaattctgacaaagtgtcgaataactcgacagatttgtttgaaactgaattaattttcataagcatagaaacaaagttatcctataggaaaaattcgaagtcaaataattgataaagtacaaatattaaattgaatttggataaacacttaagtttcggttgagccaaactattattgtgattccttcaaactttgtatttttattggtaacattgatcccaatgttccacaatgatttccagtaacggaaaatcgacagacaattttgttttttttcctttagaatatttaggattaacatttgtgacctggaaaatacagaccaaatgcttgataaaaataccttaaactttcaattccaggtttaactcctggaaatcctggggcatagattttttgattatttgtttgtatataaccgtcgaggccttgagcattcatctttcaacaattcatgtaaaacatcttcatattgattcaatttgattggttgaaaacaacagaatcaattaagtattttgagaacgattagctaaagattgataaaatcatcagatcttacaaaaatatattaagaaaaaaatgcaacgtgaaggatttgagcttgactacaatctgactgcaaatattaattatttaaaggatcattattcgggagagcaaaaaatagcaagcaaatctagaatacaatatacaatgactacatttactaaaacaagatacagatggatatttattgccaaaataacaaaagaatttgttctctacatgcattaatttaaaactatatctattttatcctttatttgaaaaagatttttcttatttacggtaatattatgagatttgataaagttttcgcccccataaacttgatgaactattgaatactgattctcaaacataatgtctactttatgtagcttgtaaagatcattaacttcaataatccaacggattttattttcttctcctgatgtactttcttgtgagatcacgaacgatattgtaaggtggctaaacttcatttatttgtatccacccaaagatctttattttcataatcaatatgaaccaattttactgattataatgtactatttattctatccaaaagtgcaaagggccctgttaacttaacgataaatctttagcttaaagacgctctatttctgttatgttaagtacaagaaataaaacatcttcagagcatatttactatggtctgtatttgtactttcttggcttatcgcttagaaatactgccaaggcattgtcctttttacatattatcaatagaagtcacgttgcaatttggaattggattcaaaggtataaacctcgaaaggtttcaacaagaagaacaaaaatatcagaatacctcattgatgagacattaataaaagtcggctcagaatactcctggttatgggcagcaatcgaaccagaaaataggcaaattctcgcactctttcttagctaataaatccaaggagaggaacatgcttatcgcagagagatttatttcaggtctgatcaagattcacggaaaacatgtcgtatcaacagacggtggaacctggtacccaatggcttgtagattcctaaaactaaaacaccatatcaattcttcgtttgagaaaagtctgattgaaagaactatgcagtacatcaaggatcgaactgaaggatttgacgattactttccatgtagtaaagagaagtgtaaactagatcatgtcaaaaactggttgaatctatttgtaaaaatacacaacaaggaggtgccaaacgcctaagttaacagcgccgtgcaaagtgcgggatttgaagccgatccttcatgcagtattcgtcatttaattaagtatttctttaagaaggtgtttattcttcatatggtagtatttggttcttggttctaaagtattaaacaaaatgatctgaaaccacatagatatatccatttgggctagaaccatccaaattgttgattttggtaaaaaaatggaataaattatttacttgcagtgaccttttgaccagccaacactgtatcctttagcgtaatcccctgatcctggagaatatccccagcagtgattatgatcccaccagccctgttggcatccttttatccaattctgagactttccagagtattctgtgcaataatggggcgagcttttgcattctcctttattccaaccaactttgtaccccttagctatctcgccggtccctgggttgtaacttttacaatggttatgatcataccaaccttgtttacatccttctacccatgcgtttgactttcctatttcatctgcacaataatatgaagcagcatatacagatttactgacgatcaatgacggggcgactgcgattgatattgcaacaaatgctattgcgagtatctttatattagtatccattaaattgttcttataatttgggcatataaaagcatttttgggtccttttgaattatacatgccatctgatgttattccaattctcaaagatgctgtaaatatgatggtatggaagccacaaggtcatgaatatcatttatgttatcagcaattgtttgaatccaatatgtggtcagaatagaaaaagtccaataaataaagaaaattttagtattgatttttcctctggatcaacagggatgaaccctttaatttgaaccctattttttttattcttatcaaatgaataatgactgttgccttgttaatttcatgaatcttaaatcttaattttggaaattattgacaattcttaaataattaatttgcctagagttaaaataatccaataaaacaaattcgggtagcattctaactctcataatagtagctataatagtagcgattatgtctacaatgatcatcacaagtccggtgaaaattgctaccgtagatactcaaaatatggatacctatagtcacaccctatatggtaataacgtagtatgatactgtttaattgaccttgatactgcgaaaaagtggtatagacatattgaaataataataccaacctacaagtgcgtacataccgacttcggaagaaaacaccgttggctgagataacactagtccaaaggacggtggaggagtacagaacccacagttatagcaattcgtgtggcccaaaaggaggtgttgattcgaccaaaatcaatagcggtgcaatttttgattataaagaatatcgcaaaaacattggaatatacaacatttttttactttaataatctaaaaaatataaagatcgggatttgagccccgtaaaggttataaattccttatcttgtcaattagatctagtgaattagatccaacatcagtagtgatatagagtaagtgactctcgtcaaatggcatggttatacgctttatcttttcgtactccgctagaacatattttccttttcctatctttgaagccaacttactccgtgttttccatgcgttaatggccaactgcaaggattcctgactctcttcttttgataataaatttgtagttccgggattatgctccgaatacaggatcttttcatcctttgtatcaaatattgttacgaaccttattgcagaatccattcccaatatcctttttcctagttcattgtattccaattgtataactttgtatcatacttttttataaacattctctagataatatatatttttaattaataacatctaaaatatgtattatttgtaaattccgtataaatatttgtaaaaataataatatgattgaaaatatattaataatacatttcttattttgatgactgcaacttattgaatctagtattaaagtaaaatttcaacaccaaaatcatgattaagaaaaattgccaaactttacggttgcaaaattgcggtattgaaatatcatatttggtttagattctattgatttcatcaaccctgtagttttgttaatatagcggcgacttgaaagcctgctaatagcgcgattcctttaataattcctccttccttaaatgccactggaatcatagaatctgctagcataacaagttactgctccccgctgcgaaagcgattgatattgagataataggtgggctagcatatgataaaatagtataccccagagttgttgatactgtacataatactaatgctatggaccatgttactagtattcgtttttcacctatgccactagatttcattccataagttgaagccaatccttcaggaagatttgaaacaaaaattgcaacaagaaaggcaaaatttaaagcacctcctgtagcaagtgtaagcccaagggccgcattttctggtataccatccattagagcacccatgaataatgaccgaccagaatctgatgatgtagtattcccttttcttgataatttgatcccttcttcaggtgattgctactagctttggaattcgattttttcttgaggaaataatttgcaatgttaaaagatattcctccgagaatgaaaccagttacagtagcggggagagtgtgggtgacctgaaaagcctctactaaaattgaaaaagtcaaggttgcaattaataccctgcttccaaaagccattattgttgtaatgactctacgggacaaattgacatataaagcaataacgcaaccaataagtaaaggactgcttgcaataaaaccccaaatcaaagaatcaactatcccattcatatagcttcctaatttaggtatttaaaatatttttaattacttgaaaatggaataaataactctatctaagttctattagaagaatatcaaattcagttagcttatatcctaatccatgttgcaccttggaaagatctcttactcttcctacaatatgtggtggttactatctgattgagctttctggaaatattaactaatcctgatatttgttttaccacaatctaagtagtaaagttatggaaatgaatgccaagacgatctcctcggattttatatcctatattatgagtgctaataattgggaaatcataaagaataagttaccattataaggatctaacagtatgaaacatttaattattatcatctatatcctaaatgaaacaaagataaatgaacaaaataaagtaaaaagtatatacgaaacttattctttaatgctatgcatggcaaaaatgatcacttgcccatgtggttggacacttatatctccccaaggaaatgacgatataaaaaagcacatacaaatacatgctaaggatcatcatcctggcttaacggagacagaggatgaagttgaaaagatgattaaaacagtttaatgtttagccaatgttggaccggcgatagtattatgacatcgaattgccttcacgaactgcaaattttatctaaattttgactcatgattttctgatctatcaagtcatccatccaattttgcctttttggttcgacaatttctttaaatataaaaagggagcaagatctaacaccttctagttttagtacgtttacatatgtttcttcaggctctgcaagagtaaatgcaaaaagattagcaagcaagatcttctctgctatgattcgtacagaccaaagtttatctgcatatatttcccttaaatgcttgataattttgtatcggcttgctgcatcgactgacaactccagttcataaaatattaaaccttgttgtttctggctatttattattgctcgtactattaacatatccgaacctaagagttttgtaatcctatatcgaaccatcctcggagtaattgataatgaggctgagatctcgttgattccggatagtgcattatatcgaagcttttggataagtttccagtctaacttgtccggaatgattagtggtttttttattgcacaacttccaagcctccacttaaataattcaaatctattggctatttctatggctacttgatctatttcctcagaggaaccccctgtgatactaatagatactgtattccctagatagtcgactatatcgacaataaatggatgttcataagcatattttataaccccgtgtttagtggtaatatttaacgcttcgaatcgataggtattaatatttttgaattcgaagaagcccagcctgggcatagcctgatagtattttatgaatccgtcattttccattttctttactcttgatctaactgtcttctcatctaatccaagcttccttccaatcgctgaaggactaactctcctgtctgtaaacgaatcataatcgactcctttgaatgctatttcgcagaagatccatacgtctttggcatccatcaattttccctgaactacattgctaaaaaatttaagtaaaaattgtcatccatgatcgatgcattggcgatagacgcaatgctatcaattaatatgtagaatacgggtgtcaagctcccggcatttatttaccaatcttgcaccttgtatctatataatgaaacaagaaacaacatcattggtaccctttcaattggagatggtcgatctcttaaaagggcacccaagtatcacacaagattctgctaattatacaggagaagtggaaacaaatggtagtaaatgaaataaaattgcaggaattcattggaaggatcataaacgactggggagctacagaaggagctttgatcacttttgttggagataggcttggattgtttaaagctatggcgggagaaggtgaactggcacctgaagaattagcaaagaagacaaacacacatccacgaatgattagagaatggctagccagtcaagctgctggaggttatgtcatttacaacagtaacaccaggaaattctttttgcccgaagaacatgcactggcactgactgatgaaaatagtcatgcatatgtctctggattttaccaatcaatagtaagtcttttcaaagatgaggaaaaaattttagaggtattcaagactggaaaaggtctaggatggggggatcatcatcattacttgtttgaaggaactgaaaggtttttcaaacctaattacatatctaatctaacacaaaaatggattccagctcttgatgatgtcgaaataaagctgaaaaatagaaaatgcaagatagcggatgtgggatgtggtcatggagcatcaacaatcatgatggcaaaagcatatccaaattcaagtgttataggatttgattcacataagccatctattgaatgggccaaaaagcgggcagtagaagagggtataatgaacattacatttgaagtggcaaaatcatcagattatccaggcgacgattatgatttggttaccttctttgactgcttccacgacatgggtgatccattaggtgcagccaaacatgtttgtaaaaccttaaagaaaaaggcaggcacatggatgctagtagaaccatttgccaataatcaattagaggataatctaaatcctcttggaagggtattttattcggcatctactctgatttgcgttccggcatctttgaacgaaaatggaccggctttgggagctcaagcgggtgagcaaaaaacaacggagataatgaaaacggcaggattctcaaagatccgttgtgctactcaaacaccattcaacttggtcctagaggcacgaccataatccacctattcctttcaatatttggagagtaataggacaatcaaccaaaaggggtattgataatgaggatcagaaaatagcctaagataaattgatctttcttcgagagcaagtatgaacctctctattggaatccgcaatctgtgactagaaagaaccttatatgaataacgttccagatttagattctaaatcatcaaaaggttttatgaaatatctggagtttcgaaagattgaaccaaagacaattaataaaactatttagaattgctctaaaatatcatataatatattttatgaaagaaatggagtttaacttactgcttattacatccaatctagcaaatatcgattcaaaagttctgaatagatgcaccatagcaaatatttttgaattcatgttatagtagactcatcccagggttaaaccactaccaagtcttaaagttgagacaaacaaaacaatgtagttttctattgtggagagattccttaagtttaaattctgtattgcatttgtcacaaatcaattatattgccaattaaaaacaattatcaacaatattaatcttattaataatgtgactgattaatcaagagtcaaataaaaataatcgtcaaatatgtagtcaagagatgaaaatgacaggaatggtacattcatcatttttaaaatccatgattgtttatgctgtggattcacttcaccatcgtcataagttaaaagtgattatatagggtttctggtttatttctaacttctttaagtagtttcttaatactatagagctgttgttttaattaagtactatatattttaggagccaaccaatcgcttaccgcaataaggacaaaacattaaaggtgcgctggcaatattgccttcaaacattaaatagtaaactcctttatgatctcctgaatacttaaaaatctctgtatcatgtctaatgcattcactttcatattcttctttaaatttctcacaacaaaattctctagtcattcttccttgctcactccacagattggacaaaactttaggagtatataaacaagattgcaaatctctattttgatttacgagtagaaaattaaccaggactccaaagtcagtaatcattctaagaacaaagagtggagagtgtggactagtcaaacattaatcaatcttattaaatataatagaaagtgagcctggtttggtttgatagtaggcttttgtaaatataccatatcttattcatattaataacaattcagatatacaaatgattttggtgtaactattattgttctaagaaattagtatagaaggctattttggatttgggaaagccataggaatagttggtactttgtttgtcgttccttattttttagaaaacaaatgcaaagcctatcggttgatcttgaagcaaaaattctacatgatttggatgataagataaatggattaacaagaatgatggtagatgatccagaactaatcaagattgtgagtaaatcggaatcacattttacaccagatctagtatttagttaccatgtgttatatacatttgcatatgtttttcatatgcaacaacgtggagtagttaggtataatgaatggattggatggaatagatatataacatctgcatttcaaccgggtaatatatatgaaatatggaaaaataacatagaagtagaaaatggttcgaccctgattttcaaaaattcattaatgatgaaataatcccggccattaggaagtagataatttgaaaatatttttaattcaattatctaaaaagtaaaatctccttatttaaacccacttgatattatcctagagagcctgacgggggtaacattaagaatactattttagatctaaatcgtacattagggttttttcttttagatgttgtatagacaggacacagaaatgttgtaagcaaacttatcttttagtctttagaaaaatcaaagtttattgatttagttatatttattttgtaatgcggtatttgtttattaattcattaataagattgtttttggttttattattcattataaagtgtctaaatgatttgtttgctcaggatttatataaccatcaaacagtgtgggactatatgatctccccagcatccgtaatggtggtggatgatgaaaaagaccagacaattctgtttagtctatttctggcgagatttggatttgactcaattacgtttaacgatccattagtcgcactcaaacattatggccaaatataacaaaagatactcattggtacttgtagattggaatatgcctaagatcgacggattagggcttgctagaaaaataagagaacataattccaaagtgaaaatcattttgattacagcctactttattggcgacatttttacaaaggatgagtttaaagaagttaaaatagcagacgtaattcaaaagccgatagtacttacggaatttggacgacgaataaacctactttatccaaagaagaaatagatatactaatagcaacccgatgcacaaacagattatcagaggggaacaaattggttcaaatcccatagcatattttcaaattctttatgtaagtttattaagtgagatgtggggaatttgaatcctccaacgcttgtcgcctcaggattctaagcgattaggaggcattagcataaagcctattaatgcaggtgaaatgatatactatagtcaaaagacctcagaaataggatacttgaaaatggcactgataaaatcaatactgattggcagtaacaacgaagaatgttcaattgatgaagttaacgatgcaactcaactcaaagattaggtcggttacaatcaaccaatgaataaaactttgaataataattaagtataatacggaatagtaagcaaatcttattctcatatggtattttaatatccgatgtttttattcaatccatttcccttacatatacccaattctccatacgttattgctaatagtttatatatattgtcttttaatcacaaaataatgaataaactaggtataatattaactgcaatcgcgttgcttagtgcaattgctttagttatacaactctcggaaccaatatcggcacatcaacaggaacaatctactccctttgtagtacaatctacaaaacaatctatgcaagatcctctgccaggtcatgaatcacatcaagttgtgattgcagctccactcagagatgactgaaacatttattcaggtatagtttcatttactgcaagtcaacccatcgatgtggtaatactacataagtacaatctggtaccaaattcagctataattgcagagccattgaagccatcagttgatgatggcaaatttgtagcatcagtgatgaagcaattcacagaatccccgtttaatgcaggatcatttgtatttgcaggtaacgctttagcattccacagtttagaaggaaaacccttcgtcataacatatacaatagatggagatgtcagttccttaacgcaataaagatgacagatatgtcaaatacctaggataaaaatgcaaagtgttggatttgaacccgtcatgtcgtgattctgttatgcggccatatatcccttcaaaatatcgtttacttttgaatatcggttttctgattcttgtatttacagataaaggagcaacagaagcagcattttacctttaatgccaatcattcaaatcagataatgagttttagatttcaaccattcatcaagtgtaagaatattttcgtacaaaattgtcacggttacaaaacattttgaataaaattttccataacaagtttggcatatgaagttgcttttagtagacaattatcaagacgcttagaacaataggtattcatgtcatctataataaagacatgctcctaccttgaaattcttatttaaataagattatttaatataaaatacatgcaagtcactcatgaactaacagattcggcccttggactattaagagggaagaatattgcttttgtagcatctttaatgaaggacggtggaccacaaatcacccctgtctggattgattacgatggagaattcatattaattaataccgcagaagggagagtaaaacagaaaaattttcaacgagacccaagagtagccatctccataatcgatccgaccaacccgtataatacagttagtattagaggaaatgtaaaagaacaaaactcagatggtgcagatgatcatatcgatagactagcaaaaaaatatctaggagttgataaatacccgtttaggtcgccggaagaaaaacgaattattctaagaataaaacctgaaaaagtatttcatatttcgaatgaataaaatatatcgtgatactcttacatcagagatttatttacacggcattacggggtaaaaatattcgagtaatcatttcagtccatcgcccttgataatgatgaacattctatcaagttcaattagtcatgtacacggaatattttgttgtcaaaattaaaaagtgcttaatgcgggatttaaatcagactcctaatatagattagcctagctttttatcataccaaacgaaatagacatgggactccccttagggaacaattccttttatttcatgtttgaacataagatgataatcatggaatcatcgaaaaacaataaagatactaaaaattatgtggaatttgtcttttatcgtcctcaagaaaaatcatgagtcattattacaagttacaaatcgattgatcgagttgcttaaaaaagaggaggtgacttatgactgctttggtttaattagtgctgaaaaaatatccggattcactagcatatccaaaatcatacctatcaaccccgaagaagaagatatatggataaatatagtaacatacaaagaccggcgacaccgttctgaagttgtagtgaatatatcaaatgataaagaatgtcgagatatttacgaagagtttatgaagttaattactccaaatacggaatttatcaacggtgaatttagaaatttattgagaagttaatgactaggtgtaagatactcaaatccctacctataaaattcataatcgtgattagaatgatctttcctcaggatcgattatgaatcgctttattcgaacccacttactgggacaaaaaggtcaaatatgtcaaaggttggtatgatcataaccattgtttgtcatacaacccagggaccggcgaggtagccaagggatataaagtcggttggtcaaagggcagttgctaataacttatttttttattgttgatttataaattagatagtctttttatttctaaattctgttctattagtgtagccattagtgttgaaagtagcagttccgtatcactttcagattttgtttgtatggccttgcgccgcttgtaataaacctttgataccatttcgaatagcagttccttatcctttgatgaagaaaatctagccataaaaccatcaatattctttttgattctgttatatgcttcatcttttatcaaatgagaattatcagaggcatcaatataacgatacatgaaaattactaaagttaaaaatatttaagttaatatatttactatctataatatttgaatcctttgaatttccaattagcttaaacaagaagtttagcacaaattaatggtcatcacatccattggatgatccaacatttagtgggtcaaaggaatccatataacgcaattcatgttatgtaataaaatctatgactaccgtgatatccataaaatctaaagatggaattgttttagcaagtgacagccaaggcacatcatcaaaagtcaaaaccactataaaaaaagttttcaaaataaatagtcatgcaggaataggtgcctctggagatagttcacaaattgaattatttgttgatgaactcaagcaaaacttacaaaacgaaattgaattagaatcaggatttagaacccacatgtatagtattatggcgaagttgcatcgaatatacaactacaaccattcatttctatgtggatatagtggagcacgattgttttttactccagtctcactagtagctgtaaaaccaaaaaacggagattcttatctctaccgtatgggttttggaataaccgggaaaaataatgaagtatcttcgtatctatacaaggtaaataatgattatgtgtcaataggttctggttccacttatgcacgtttggttcttgcacaacaagacagacttaattccacaataaacaggaaattatctgatttatccacagaagacaatgtcgggatagcagcatacattattaatgaagtgaagcagttggacctagaaacagggggaaagacccaggtttcaatagttgatcgtgaaggctatagagaactttcatatgatgagcaagccaaatgtcatcaaacgatgacctctaatctatattcctctttgaacgaatacttttcaaataaggataaaacaagcaaaattattgaatatctttttccatacgactgaaccatatttgattaccactaatttaagttccataatggatgagttaatatttgacgatcatatgaccctcctcctccgtcacaaagtattttttgttgttgccctaatcctccattatcaagtgcgtataatgattgcaatgcataatgaatgaattttctattatgttttgcttgaaaccctaaaaaggactagtcaacaaagcaaatgacaatgcgagatcaagacaagtcatttcaaaataaaagtaacctctattccgtttatctttgcttttcttgtccaaaacaaaaaggaacagatattagcaccgcccgtagggctttgtacaacgacgattatcaaaaagatactgcaagtcgaccgctccatcaccacgcagtcaaactcgatacaatggattcttcctttatcattactgcacagttcaggatctccaaagattcatttcccggcttttacaattgatctacttcttatcagctattagcataaatgtatgattttggttggtatttacaaaatataacaatatttataaatatgggtaccaattataatatatggttaaatgcaataagactttactaaatattaagaaagtgttaaggctataccaagaattgtataatattaatatacctttagtaattattgtcttgtttgccatagctttttcaatagttaatggcatactctttttacctatctattgtcatccgaatcctttatcctatgaaccacaacccaatcagataattgatttgatacaaacgccgcccgacaaagtagctatcacttttacagagagaccagaattaaaagctagcagcatacgtgttatgaatttaaataacgagaggatagacaaccatgatcttaaaatagcagggtctgataaatcactttctgtctccttaaataaatcgaaactaatatctggtgattataccataaaatggttagtcttgtcaaaagatgatggttttattactaaaggatcatacattttttcaattggtagaactaaaagttagaatcaaaaatgagagtaacgtctgtcatagtgatagagttcgtattgaatctttattgaaaccaatactggaaattattagttaatagtatattgttacttatggtaaagtaatttaatagaaacaagtatcaagaaaagttacctcgaagacacttgtttctgtttgaacttgcttattcagtatatgttgaatgatttaattttcactaattcgaactgttttcagagcttttccccaaacgataacttcatccaacatggcattgaccgatttttcatgtactgaatgaggtttaaaccttgtaaagttttcaaaatcagtatacagagaaagttgtacttgagctcgaacagtagcgaccttaacctctgccataaccaaacgcaattgctcaactgctcttacacctcctgcacttccataaccaacaaaccctgctaccttgttgttccattctttgaagagaaaatcaatggcgttttttaaagcgccaggaattccatgattatattcagcggtcacaaacacaaatgcatcaaatgagttgattttcgcagcccaacgttttgtgcagcaactattcccacgtgtttagtaatatcttaatccacagtagagaaatcctatgattagtgaattgttatcatctatttgtgattgtatttaggttcatgaaactttaagattgaaattcatacgatcaattgaaagttcctcttccagatattgtttgaattatgctaaagtccacaattcttacacttttgttaagtcaacaaggccttagtgaggcatgaccatctaatgtgatggtaggattcatattggctttttcggttcatcacggctattctttaatatttatacataatggaaaaactttgaaatatgatggtaaaatgccgattggttccccgtccaccgataccgtaatgttattttcaatgtctgataataatgctacagcttgtgattgaccataataaattccatcttggttatcgatagactcctcccccctctttatatccacaagtttatcaagtattttgaaactacttgaatcttttactattatagtatcaagtaatccgtcgttcatttcggctcttgttgccgcattaaaacctcctcccataatactgccgtttgataccattgccatcgtcatcttggtcaaaagcttttttacgtttatattatcagtatcgcctaaaaattcaatcaattcgcaaacattgctctgatatgttggtattgttgcaagtatgcctgtaatggttgatagcaatcgactgctgattctgtctcttaccattttagacctgtttattacttctgccccaattcctatttcggcagcatttaaaataaccctactgacataatcttcttttacttcttggtcaattatcttattgtgcacaattgctgtgataacatctattttcttgaagttatctgttgaagttactaccttgcagcattcttcaatttctgatggcaaccccaatgactttactagaacatttctagttccacctggtagaactgttagtattgcttcgggattaatgacatccatatgaacaaattttgataaagttttatcatcattcatgttttctaaattaaagtctttatctatttcaatattaaaaaatccattagcaacttcatttatcattccgtcacctcctattggaattatattgttatagcctttttcgagatattctagtgttagaatggtgccatcattggctttctttgtaaagatgtattcgatgtcttctccaaaatatttttttaaaataacatacaaggaatcccaattttttcctgtttgacctccacttgaatttggatttactattactatggactttttggtcattgttataatcttcaaagtatatattcatattgattaatgtgtcggtgtgcctacctacaattgttgtgaatatttatgttttactttttattactttgatttgatttccttatcgtaggaaaatatccattttttcttccaaaatacaaataacgatactatagttatgactaacatcactaataccaaagagcccagataccttggtattgtgtctaggttgtttaaatcaaatccctgcaagcctaatacacctatcaaaagtgtgagaggtaatacgatagcagagaaaatcgtcaatactcgcattgtctcgtttatctgtaaagatatactactcgaaaatagatctcttgtagaatttattgtatcctgataggattggatcatttctatgagctggttaatattattgaatacaatctggagatattttatatcatctttgtctttttccatagtaacatgatagtttattatattcctagcatcccagaaatatcgtcgaagggtaatgacctgccttgataacgtatccaaataggtgagcactcgtttggatggtctatattgtgcgtctttttcaatatcaaataccttgagctctattgctgtcaaaagttgttcgtaatcttctatgatgtctgaaattatactatagtagagtgcatcgattgaagattccaaaattgtttttctatctgcgagaattgtttttactttcgttaccaaatctattttatttgaatgaatagttatcagccacctatttcctacaaaaaagtacagtggagaagattcaagatgttgtagattatcaaatttgaggtctagtaagatgatgaacttactatcatgttctatttcttttaccacaggtttttttgatttttgttttattcgacctaatgcttttttgtttagtgaaaacttattttccaaatttgtaatatcctcatctgtgggatctgaaatatcgatccaaagattatggttttcttttagatccccatttaattcatttttctcttctaccattcccttttgatcataatagaagatagttttttgcactatatttgatgttgttttaaagtattaatgtctatttcatattatagcaggtccatcaaccaagcatttttgaagatcaatttattcggcaagagggtttaattggtttctaattgtataatttaaacatttgactaactctaaggttatggctgcaccatcatttgaaaaagacgggatctcaaaataaatttgataaatttgtaataatagacagagcaaaaattactctaataaaagtaagacactcttttgttattctgttcaggtgattgttccttaaggattggagagtcactaatgaaaaactagcaacgctcgcgtgtgtttgtgatgttgataagtcataacctttcttaagcacaactagagggcatacttatcgtgaatttgatactaatcgaagttttgtatatccattactttaatatttcaatattcaggtcaaatggcaggaagatgtaatttattcttgttagagagaatgaaatctagaattaccgcatattctttcctagaatctaatttatagatcaccttttatttaacaaaatatataaaacttgtaattttgaggatatgaaagtatgacatcgctttgcacgttcaaaaaagaatattatgattttcaaaatagacaaatgaagacagtttcatgcgaatatgatctttgaaatagaaaaatgataaaaactggtcatttagaattagggtagaaaagaagaaaaggtaaagcaatatttaacatttctataggcggcacatctgtgaaataacaaccacacagtattaccaatcctatttgtttgtctggattgaatccgacaaatgaactataaccgtctatacctccattatgccaaattacctgatttcctaaatcagttgtgttaaaccacgacaatccgatatatccatagtggaacgattcaaatcctgaaggatcatcaaatggaacttgtacttcagtaaacggatgtctaatcaagtgacttgtctccattgcgttattgagctttgtacccatcaatcccatgttagctgagacatactttagtaaatcattaactgttgagtacatcgcacctgcaccttgtactttttgagggagaaatattaattcactttcatttcctaccatgtggccttttgcaaatttagatacaatattctcaggtactgatatacttgttgcattcattgcaaatcttgtactattcattcctaatacattccctattctatccttaagcagctgatccaggggaatacctgtaatgacaggacatgttctaccagacccaatcctatatttgaataagcagatttagttcctggttcagttgctagtgttgaattcgaaagaaaatcataagatttctccggtagaatgaaggattatactctaccaaaaatcgaatacaatgaaagttcactcaatttcaaggagaaaaaaaagaaatcgctaaactattaagaacagatagacatgagatcctactgttcaaatcagaaaatattagcacaaatccagatgaaattccagaggatgaaactgcgatcaccgataatataattaattatgattaatgggtcaactcggtctattaaatagttttcagaataaagccagatcgtgtacggttcatgttagactagataaactaaacacaaattcagacttgggtaaaatcattagcaaccttatctgtatcagacaaaggtattgttacttctcgtacgttagcaagaaatgatgaagtaataataggaatatcaggttaccacatagaaactgagactaaagaggagcatatctgtatctattggaagtgaaatgttgaattaacacgcatggacatataccatacccatattctcgtgctctagtagagtgggatcataaaactaggtatggaggatatgtttaagacagaaatttcggaactcgatgccaacaagatgaaatcaaggttaagaaagagaaagataacttgtttatgaatccgagtttgggactcttaaagtctttgattatgtcgattatttcttttcatctaaatacgttagtgcaattttacgatggaatctcctgacatattactgctataatcccaaacggactaaaatcctcagatctatccaaattattctaatttaaatatgcaataggaccttaaacaaccgatgaacgcatcacataaactttttggaatattcgcaatccatagcccagagtcttgtccgcttaataatactaaaagtaaagagatctttaaagaaatacacaagaagctaaaatcaaatgctgtaaaatatggagtcaaagaaattaatggattttatatgtccgtactagagcatgaatggtttattctggttcaatcaaataatgctcatgatattgaacagctatgtatcgaatctgggatatcatcttttaatacagtaaagattgtgcctctgacagactatcaagatgtcctaagcagaattaatcagaatcaataaatggatatttactatctttattttcatcctttgtggctttttatattcgtataaatgctagactaactatactaatttcattttgtcatgcgagaatttatgctgaaaatagataataatagcactaactgctgtataggttttaccactcccagtcgccttttgaatcaaggcgctggatttattgtctgataatgactgttctaaattctttattgcctccatttgtcttaaatttagagcgatgcattttgaaaccaacctagataagtaggttcaattttagatttgaaagtaagatattacttgcctattccgctctttagattgtccttggaaaatatgagagtcagaatacttttctccaaaaccagattgtgcacctacattattaccagagttttcttgaacctagatattgatgttgttgcctgaatcaattatttcttcaaaattagaacccagggttatggtgacgctatcgggtttacttaccaaaccctgcttgtttgtcacaaccggttcaaaatgcaaatgtatgttggaatatggttcggggtgctgtaaagattcaatttacagctgttgagttactcagagtgactccaagtccgtttgatcgagtccactataaagtcagtgtttcattccttgggtcagtaccaccatggtcttctaaatgcactgtcacaccagagtctacagtctggtcaagtccatcatctgcaatcggcactattgacccaattacagagactgggtttgaatttgtgcttgctgcgtacatgttaccattatcctaattgtaggctgttacctgtggagaccctcaaactggtatggttcataatacctcattagtatctgaatcaggttcttttacaaacattattttggtggaagtttttcctcttcctgctcctcttcagtatgaagcaatatgtacactcctgctgctattagtccaccagcaattggtgctacccaataaatccactgataagcaaaatcccaagttattaaggcaggaccaaaggagcgagctggatttaatgaccctccagtaattgagcctccgaatataacattgaatccgagagtaaaacctatggctattccagccaatggaactatcttaaagttttttgaagtggttgtggccaatacaacatataccaatgtaaatgtcattactgtttctaagataagggctcttacaatgttgccgtcggaaggtaatgttacactagctgacatttcagagccaaaaattgaatagacaactgcagctgcaagcacggcaccaataatctgagcaatgatgtacacaactgcttcctttctaccaattttcttggccactaagagacctattgtaactgcaggattgacctgtgcaccagaacgatatcctatggcatatacaatagctgttaagactagagcatgaaccaaacctattccaattactcctaattgtccgctatcagaatagacggttgcagcagaagcaattgcatatactaaaataaaagtacctacaatctctaccaaaaatttgtttcttaaagacggtcggaaaatcttttgaacgtctttatccatgttccatactaatagtcgcaaatatatttaaatgatggtataatcccaattttagagaatcaatgtcttttgagttgagataattgataaaattagaacattatattatgattattattcatgtgatcaaatcccgcttgaaaagtgcaaagtgcgggatttgaaccatagtcttttggaatccttttataacaaatgattaaaaatcattatcaggtattaattcacaaattaattcacaaattataagaatcttggaatcttacaaattgtcgaaaattctcaaataattcaattgccatgacttaaaatacgactaacaaaataaaattcaaaatgcagcgctccctatgacattattaccactgatttcaatgataattttaagcactatgactataggtaatgtagatgcacgaaaaatgaatactgctacatgtaccagtaataatgatggaaccgtcggtacagtaatttgttttgcattagatcaggacactatggttcaatggtgtactacctgtgttaatactaaaccccctagtaactgttcagaagcagaacagcaatttcataccaagggtggggaaaatgcgaatccaaacaatggtggggtaccaagtagcgacgactcaagcaatcaaggctgctcaaatactgctgatccagacaagattattgatggaggaacattcaatgatgatggcagttcaagcaattcgggtgactcaaatggagggattgattcgaacaaaatcaatagcggtgcagtatttaatcaataagaatatcgcaggaatcatatataaataacgtttcttattttacttatctatggaggtgcgggatttgaactgtatattgtatcagacaaacactagtcaattattgacaatatcatgaaatacttaattacaggcattagaagggttctaatgaataaagtttgggttatgcatcttgcctattgaaaactgaaaaacaaaattaagacaaataagatatacttgctttagaatcaaatgatcatgtctgaaaatatccatatcagagctgaattcatcatagaaaaagataatgtagaacaatttagaaaactgataagagaaatgagcaatgtagttgagaccaacgaaccaagcacattagtgtatcagttctatcttaacggagatggaacaaaatgtatggtccatgaaacatatgtagattccaaggctgtgatatctcacaatgatagcacggcttcaaaaacaattctccctagaatatttaacatagccaaattaagaacacttgacgtttatggtaatcccaataatgaattgaaaaagttgttggcaggtttcaattcacagatatttaatttgtatataggattcagtcggaaaaacgaataatatgtcttatcaagatactaaatatttattttcaatcacaatcactttatatgctaacgcttattgttatagttagtgtttttaatcaatcaaaatcagcaccatttatagttttaagcgtattttttggtacattcttgattttatcagcatacttatcgtcgtttgattcatctctttttcatgatgctttggcccaatctgatattcaaactgtcaaatatagaaatctaacactagatcttggtaacggagtaacaacaaacgctcagttatcttatcccgcaataggtaaaggaccatttccggcagtgttgcttattcctggctctgacgcagttgacatgaacgaaaccttgggcgtaaatatcaaaccattctggcaaatatctcaatatctttctgagaggggatttgcggtactaaagtacgataaaagaggtgttggtgaaagtttcactattttgaacccaaatgtatggggaaataatacagtcaatgatcaaattcaagatagcaagaaagccttgaatgttctcgtacatcagcctgaagtagatccaaataggataagtataattggccatagcgaaggtacactttatgctccaagagtcgtggttgataattcgacaaagataagcaacattctacttatgggtgtcctagcccaaaaccctttaaaagagagtactatcaagacgtttccttaccattagaatacactatgcaagtattagataaaaatcacaccggattgatatctatacagcaactagtaacgaattatttattaaagaactttttgctgtcttcttcagttttgcatactaatgataccaaagacattactaatactttagttaaggaatttggtactagtgggtacatacatattgatgaacaacttaaaccatttctgacaaaaggctatgaaaacattacggcattcaatttgctaaaatgtaatactcttggagtatgtcctatattatggaaatctttatctaatatgacaacaaatttcagcttaattggtaacgtatctaactccacaggcattctaatacttaatgggaaaaatgatgctcaaacaccagttcaacaagcatttttattgcatcagaagcttaatgaagtaaatcatactgaccatacattaataacatagcccgaccttggacacgttttttatccatcatcaaaatggcaaacagggatcggacctatccaacctaatgttttggcagatttatattcatggttggagtcccattcaagatagtaaatggagttttatttcgctttttatcagacaggacaatgtattgtcataaacctcgttctttagcaataacctattaaaatgaattgaattgcataaaaacatgctactaagaaaattatattgtcaataaacagttaatttgagcataatagagagcgaagtgctatatttgaaccagtttctatgacatgattagccaaggtttaatttaccatagttaacaacaataaggaacgggttcaaaattatatatgctttaatgttttcatactaatcgacttttgaggattcatcattttctctctattgtgtgctatacacactaattgatttttttcagttgcggtgcggaaacgaaaaaaaagaatcaagataaacagatgaaaataatttattctatcaatattagaaaaataaatattcaatgtccccttatggttctatttaaattgatgaattagactattatagtatgaaatattatcttttaggcaagagcggccttagagtttcagagatttgtcttggtacaatgacatttggtaaagaatggggatggggcgcctctaaagaagaatctcgcaagatctttgatgcatacgtagattctggtggtaattttattgactctgctaacatatacacggacggaacaagcgaaaaatatgttggagattttgtttcctatgatagagatagatttgttattgcaactaagtatacttctaatacaagagcaggagatcccaatgctgggggaaaccatcgaaagaacatggtacaatcgttagaagcgagtttgaggaggctaaatacggactacattgatctttattgggtacatgcatgggatcaaacaaccccggtagaagagatgatgcgagcactagatgatatggtcaaatcaggcaagatcctgtacatcggaatttcagatgctccagcatggattgtctcacaggctaatactcttgcaaatcttaaaggttggacagagtttgcgagcattcagatagaatatagtttgattgaaaggacttcggagcgagaattacttcctatggcaaatgcacttgatataggaataacagcatggtctccgttaggaagtggagtcctgacaggaaaatataacaaatcaagtaataaagagcataaaaataatacagtaaataaagattacaaacagaaagagaatacaactaatgatgttaatactagtactagttcatcatcatcaaagttcgatcagcagactagtaatagactaaatgtagcaaatttttcagaattgtcaaatactttactcaaagaaagaaatttgagaattgctgaagaggttataagtattgctcaggagattaagcatacaccttcccaagttgcacttaattggataagacagtcgaaaaagatagttcgaaataagataataccaataataggggcaaaagaccttctacagataaatgataacttggcatgtatggaatttgtgttatctgatgatcatatacaaagattaaatgaagtaagtaagatagaacttggctttccacatgatttcctatcctctgatgcaattaggaatataatttacggaggaacttactcgtcattatataatcatagaaaattcaattaaagcaagagtatggacagttttggttgttcttgattggtgggttggtggttcggtctcctcaattctttttttactcattctcgctcaaattgtttctaccctcctattatctatttcagttaatgttcctatgtaattcatatatggatgataatacctctcaaatataattatgtaattttatactcatggagaaaaaagccattattgtctctatatttgcaatattattaactactggaatttcagcattaatccctgttaatatgacatacgccaaactaaactgtaccgaacaaaaatgtacaggtggacaaggaggacaaggaggtggagcaggaggcaattttacaattgaatgtaacacttttactcaatctggcgttggaggttcctcatttttgtcaggaggcggtggcggacaccttgaatctaattcttaaaccggcgatttctccagaagtggcggtagttctgatacaggaggaggaccatgtactggtaacctaaatgaaggagaactggagtgcacggggaaagattaaattatttttatttttattcacaaatcccttaatttttgatttagaattgtatggatttatgaatattcaaagttcttgatgatgaataaattggaaataatattgatttattatttattttgattttttcgcatgatcaaggatgaatcgtcttatttgaatactcaggctaattaattctagaagttagtcgatcagttctagaatctactaatgtctaaatttagacgagtaatccaaaatatgaggtattacaaaactatttctttcaaatcccgcttaaaaagtgcgaggtgcgggatttgaacccggttcttgttttgtccagttcaaatccctttgcttaaggagagagaaagagaacccgcgatccctctatctttagttatggtcgtagagtgataatttgatcaagataatcttcttacaagattacaccctctttatatacttccttgattgaatttggttatgaataataatagacaggcaagaaaagattatcttttcattatagtattcatttatactctaattttctcaagtatgaccatgatcaatggctttactaatatagtggatggacaaacgaatgttacccagaccaattcaagcaacaccacgaacttggtaaatacccaagacattccattagataaagtccgtgttggagatattgaaatggcgtataaaatgtttggtaaaggagatcccttgatacttcacaatggtgcttctgatcatatggatgcatgggatccagcccttttaagcagactagcatcaaataacacagtaattatttttgatagtcgtggaataggaaataccactgcaggtaccgaaccgtattctattcagttacttggtaatgatactgctggtttaatggacgctttgaaaatacaaaatgcaaacgttttaggatattctctaggtacatttacaacccaacagtttgcaattacgcatcctgatatggttagtagtgttatacttattgctggaacctgtggtgggaaagatggtatacctaaaccgactgagtttatgaaatcgatgtccgaaatggcaaataagtcttcaaacaatgaatccatgacgcaggaggatttcaaatcccttgtaactgcctcattaggatcgggatgggtaaaactgcatcctgaatctgctgatattccagaaaatatgacactagcagcagcaaagcctggtctttcccctgaagcagtgaataatcagatgaacgctggatttgcttgggaggcaaccaactggaatggtgtttgtgacgaccttgcgaaaatagacaagcccctgttaactataacaggaacagacgacaatgaatatgtcccacatgaaaactctttagtcattgcaaacaaggttccaggagcatgggttgtacagataaaggatgctggtcatgcagttccggatcaatatcctgaggaagtcggtaacataatagaaacattcttgtcgactgtaaaatagtaggagactaatcaggaaacaagaattagatattaatttcgtacgcaatgtagacaagcgggttcaaatccttatctgaagaaaggagaaggagtgcgaggtgagggatttgaaccctaagtgattattatgatcttgttttcacaaaaattgaaaccaaatagatgaaaaattctgccattctgattcttagatttgccatcattcttcctgtatcatttgttaaattaattgcatgtaatccatttaggttggattatctatgctcaattcgagtaggattaatatcgattccagtagatcttaacaaaaaggggtaatttttggatatttcctttaggtttggaaattgcactgagctctcgtatctacacttcctcgatttattaaatcatttattgtttttcttgagaaatcaaaggccttcccattaatgtcatcgctactctctagagattgaccctctccatatcctattctttgtagtttgtttattgttactcttccctcaattagttttcttatttctcttggactgccatttctactcatgctaactaacttgtttgctaatggtttttccaactctctatagatagagtcgtttgatggataattgcggtctgacctaatcatgtccattaaagaatttattatgttaatataatcagataccattgatgttaccttttcatcatgctttgatttatcatgaaataacacattctggacccggttattgatagaatccgggtcctcagggactccctgttctttggtggggtacaaaatacctatatacacctctaaggatggaacattatctaagcctttaaccttataccaatagtccctgtgtgattgaataacttctcttaaaggcgtattactaaggtaataaccatccataaatattctattatactgttttccttccggaatttcatcatcaatgacttcacctgtaatagcgagcagttctgggaatttgtatcttagatgagaagacatggtggttaggagatgctccatctttattccatccggatattttattacatgctttgatttactatcctcatcgccatatacggacattctttggttgtacttctttggatagctatcaaatgttatggttgttgcatcttgtacatctacacctaccaataacaatcttggttccccttcatcggtctttattggattttttgaatcatcccaaaactttcgaattgtttctacaataggggaattatcaaaccgtaatatataattaaaaggatttagaaatctaaaatccggttggtatatcggaggagacagaaccttatgagttccccaaggaagataagcaaattgataccatgaccaatatcttctgaatgcctcacctgaggctaatcttcccaatttatctggccacatataatagtaagacaatagtggtgattgttccctcaaattgccaaatatgttatcaaaaggctttaatgtattaacccaaaagttgttgactccttctcttagcttggatgaagcgtatagccagccttgtagaaatggattttcatattgaggagtgtctattgatacctcttgccagaatcgataaagggtctcgtctgaccccttccaaggattttcctcatccttattttgtagaacgtgattgactatcagggttgcgtttattgcgcctgccgaggtaccagcaacgatatcaaataaaggtctattttcttttacttcccacttaagaccctcatacagtgacttatagattcctgcctcgtaggctcccaatgcccctcctccttggaatacaagagctctttgttgtaacggtctggaattgctatgtttactgtatgttggaggatttgacatatcctacaaagaatgaccctaaaaataaaggttttggtaataaattacaattatcttcacttaaataaaaatccaccatatggtgttatatcaaatacttttttgatgaccagtgtttatgttttcatagttcatttggattctgcagccattaacatggcaacagattcctctttgcgaagaacaattgcaaaatcgtcacaaaaggaggtcgatttcctactgttattaggtcttaccgaggctgaaggtattgtaacaaataagatcgaaagtatcagtaaactagtttacaataacattcagtacgataatctttgctatttcctccgaaccaaataacgttagagaatatgttaatcaggtagtaaagaattgtggaagatagatccagatgtacttcaaaaagcaaaagataaacacgatggaaaaaatcataaataaagaaatatgatctttaattacgctcctactctctaattagacatttttaataatgttattacatgacatgtcgcaattaatagttttttatccttacccagtatcagttatattgattgaagagaatttttccttcttgatatattaccaatttattattacgttcattgactcggacatcaggacggcatcataaatattgatgactaattctgatcaaaaagatatttcttttagtattgtgaattaatatattatattctttattatcatgtgagcaatgtttctttcttcttttgttaccttactaagacttctaaacatattccaaagtattgttggaaactattgtaaagtaagaatgcttctgaccgacaattctatttagaacaataatagaaactttcttcttttgtgtaatgtgcaacttgttacagttacatcccgtcaaagaatcacaaacaggggtttcatatgcatacgtaatctcctcgcctatatgaccagagatgaatgcaaactttatgaataaatcaacaccaccatcaatcgctaatgccttgtggaccattgttttaataaaaccttcatctgctaaccatacacgatcatggatacgcattttcttatttagcttgtaacttcggattatttcttcaatcaggattttgagttcgggactatgcatcattctatcacagtatatcccgaacttgcgcatagcgtcacatatccatgcacgcttgtgtccactttcagaagctataagatttggttttgtgaagaaaatgtcaacatatctttcataataacgaactagatccttagcatgtttcttatagacatacttctttgatagtccttgaagcatgtcttcacgatcgatattcttgtggaatgtaggactaaattctcctgtcaaaggatctgatatcttcctccatctttttgatgaacaggatattttccgtcaatccaggcatgaacgaattcactaaacgttttaaatccattcatgtttaatttgctgttcaaaactgccacgtcattctcctttaatctgacagtaacacttttccaatgctgtatttttttatggatttgtatttgttcattcatacctgaataaagatatactgagctttagctttttcgtcaacaatttacgaacagatgtcaacaatttaagcttcttaacgaagatcccattcgtcaataaaccacatgtcaacaatatcatcaacaaatatacaatttcaatcataaatgaggtgctaagtgcgggatttgaacccgatatgtatatgtcacctatctacctgtcacaaattattttcattcccatcacccacctatttctttattaaatcaagatcaattgcatgcagttcttttacattacccaatgcataatcgggatttggataaaattcgatcgtacaaactttggattcatgtggtcggatctccacaagacaaggcgattcatcatagataagttgaaggccaacatccatcgacaggtaactttccccggatgcacagtgtgttttacagaagtattcccaccttttagacaaagaggatttgccagatatgatgtcatggtattgtctccattatctacctcggtctgaacacaaacagatatggaattaatggcttttccataatcagctgtaaaattgacagctccagttgctattgttaggtaaccgttggcagtaaaaagagtgctgtcactaggtaattcttgtacaccttttataggagtagcaaagcaggattatcaagtggtcgctcaccaagtcccctactcccacttaaagtatttggttgcaattgattgttattttgaagtttcagatcttgtgaagattcggtgcttgtcccctgagagtcagtcgttgttgtttgagtagggactggacaaccctctggtacatcatcagattgattctccagagtaggacgtggtccgggacaaccattttcatcaattaaactagtcccttcaattgtttcatttgaacaagcattgttttgctcggattgggtatcagacgattgatcattattatcagtcgactcttcgtcagtattactatcttgcgattgatcctccttggatatatcgatatattaatagcctctccaagcattgatcttagaagataggtttctcatactactttagaaaattctataggagcaatatataagaaaaacctcacttgaaattttataattagttaattgtagttgtagttttcaattttggtattcatgtagaactgtgcttgttaaatggatcagcctgttcctataactcaactccaaaaaacgaacaatgagttatatcataattataaagtttggatcctttctcaattctatggatccatcatgctctaccatctctacccatccttatttaatggcaaagtaaaggtaaatgttgctcctgtatcatccttgttattttctgcccataagtctccatcgtgtgccacaacaatcttttttgagatatacaatcccaaacccataccttgatacgagttagtggtaaacgtggtaaacaatttctgaaaaatctctttatcaatcccgacacctgcatcctttactttcaaaataaccatttccttactacttgcattatgcatattgattaccttactttcagcttttattgatattgaaaccaagtcggaggaaaactttattgaattactaatcaaattagaaataacttggcttatcctacttttatctccaaaaacgaccaaagtatcagggatttcatatgtgatttttatatttttattatcagtacaattttgataatctcttatcatatctggtattatttccttaaatgtaaaattttctttaatgagcgtaagagaattactttcaatttttgctacgtctaagatatcttcggatagtttctttaatctttttgcatttctgtttaagatatcgagaaattccctaagttcatgatcttttattctacttttaacaaagtccgatacattaattattggctgtattggtgttcttaattcatgggcggctacattaatgaattccttttgcattctgtcattgacttgtaattgttcatacaactctatttgcttccaaataacgtcgaatattgcagcatatgttaatacagtgggtaaactattagaataagttgcaaaccctattgcttctgcaactgtatgcttggcatcatcccttagctctacaactatcgaatatcttctatcaaccaccaaaattgatacttgagatatcggatccataaatctaaaatgaatatttagattgttggctagacctttacatgttgcttctatttcattatccttaggtatcagcactttcatttttacattggggttagagtctgttatttctttaagaattcgtatagatccattgtgctctagtctgtgaaaagcattagcggtagagaagataattaaaatctcctcttttacagacctcaaaagatcaacgagtttgttttgtaagaccacagggtcatttatagattcaatgacttcaggaattatacccttctcgatttcctttatttttttctcacctggaactgctgttctccataaggtatcaaagatatattgaccctgttcaatcacttcttttacattgctatagataacttgggtaagaggagtactttcttgaagaactgtggtagccatatattctgactcgctgacggcaactccacctctaacgccatctagatgccggagttcatcaacaagatttatcagatctttacagttaccgacattttcttttgtaatctctgtaaatgcccttatcttccctcccctgttacgaatatttagatatccatctctatattctttaatctctactacaattgatggagcacttttgtcaaaatatatatccatcctttctttgacgttttccataaaatatattcccctccccaccgctttctcgacgccataaagaatctctgagcttttatccttggtttgagggaaggaaggaatacccgtaatgtttcatctaaatattatgtttaagatataaaaatatgccgctgcaaacactttagtacgaaactgtcatagttcattaattctcctattttcaagtaacttttaattaaagaagttgctttgagacataggcataacaaatttttaataaaatggactagtaatacaatatagtggatgaaataactctcaagcagttaaaagagtccaattattatcatcctgtaattactgacgttatccatgattataagatagtgcttgaaatggtcgcagatggattgaattcgaccgaattaggatataacacagtttgggatgctgaaatgtgtaaatgggcttccaaatattttgtagaaggattagaattagtaaaacagagaatcaaaggaaagggcataaaatgtagactaattactgaagtgaatacagaaaatgaaggatttcttaataccttacctttcgtagaaattagacatttagatggattgaggggaaattttggcatccgtgacgagaagggatacatggcgtttgttcttcacaaaaagaatgatgaatttctgcagacatactttagtaattctaaagtccttgcagaggaacaaatgcaattgtttgaagaattgtggagtatggccataccattttctacaagaataaaagaattagagtatgaagttaaaagagacacttagaaaaccatgtcagattttgaaaatattcaaggagagttagaatcgttgctcataacatgtaagaaggacctgacaatattttcatccaacaaaattctttgctatcctaaataaaggtaaatttattgattatttaccaaagatactccaaaaaagaagcatcaatcaaaattctcatggaggatgtagacgaatatttgacaagacaaattgcttccataaatgcgtcaacacaagtcaatccaatccaaatcggatacacgaataagattgcagaaataaatgaaatggtcataatatttgatagtaaacacgtgcttcatgtcaactatgatccaaacaacaaactagttgcaacatactcaaatgaggaacacagggtattgattcgagttaatgtttgaaaagcattggaatgaagtaaaaagcctggatatcatgaataacaactaataaatccaataacattgataatactgatctttactcgggatcaaggacgaaccgctttatttgaacccgcggctgtcattgttttctttagtttattaaaaaaatattcaaacaagatatggttgaacaaggcttagccatgttaaaataagcataaaaaaattacatgacctattagatttgtctaagacaatacaaaatatcaaaatagagcgatctccatgatagtattagtattgatttcaatgatagtaataagcaccatgaccataggtaatacagatgcacgaaaaatgggtacttattcttgcacctatcatcttgatgtggtaagatgctgtgcaatagaccttgacactatgaaaacatggtgtacttattgtaaaaataccagcccacctagtggatgtatacctgctggagaagaaagtcctaagggtaacaaaaatactaatccaaaaaatggcggtgggatgcgtagtaatgatgagtcaagcaattccggtggctcaaatactgttgatccagacaagattattgaaggaggaacattcaatgatggtagtggttcaagcagttcggatggctcaaatggaggcattgattcgagcaaaatcaatagcggtacagtatttaatcaataagaatatttcataaaccatatttttttcacttatctaaaaagttaaggtggaatttgaactccaaagcagacattaaatcctttggcactatgagatatatttaaataaatactcacgataatcgataaaatggtaaattattgtttggttgtgcctttactaccaggaaaaatggaattatcaaaaaagtttgaagaagaaaatggtggtcatggcaaagaacatgatgaattttacaagattgcaggtgtgactcgtgaacaggtttggattcagcatagtccaccaggtagtggtgcccctgatcttgaaatagttagtttagaaacggaagatcctgccaagactctaaaagaatttgctacgtcaactcttccatgggctataaagtttcgcgactttgcaaaagaagcatttggaatagatttttcaaaagggcctccaccgcctctaaacgagttactagttgactggcataaagataagtaatagaaaagtattttggatttcaatctacgtctttccacagtatcaaggatgaatcgcttagtatgaatttaaaagtcggtcgattagttttagaatctagtaataattagacttagacatgacttgaatgagtaattcaaaatataatgttttacaaacacaatccggatcttgcattcacgggtttaaactttgatagataaaagtatgattcatacttcaatattgaaaccgggaaagggactcgaagccctgtcatagaaacggggaatctaacaaatcatgacggtctcgaaaattagaatggaaggattagaccctacatgttgagtataatcttagtatcactatatgacagttgctagacgttttgtctatatttgttttggcactacttccattcactattctaatacgacaattttattttattgtagtttcttcaatagcatagtcttgacaattgttttggatatttatatatgataacatattgaggaatctgacaataggctattagacacacagatcagtgttaggcaatccattttaataacatccttccatcatattccaaacgatcgggagtgtaaaaatatctgattggaaagagtctcaactttagaataacatttggcgaaatagctcttagtttcaaaaaaaaataaataaattgactttatttaaccggtggttcccagtatgactactttaattaattatcgtcgtcattattactgctgtcatcactattactgctgtcatcactattactgctgtcatcactattactgccaatataaattggggcaaaacagtctcttatttggccttcagtagcgaatcccgtggtcccagcattctctttaagacaactctggaaatcatcataattctgctgctctgagttgttgttatcattgccagtattcgtttggtcttcaccgccatcgtttgattggcttagagtgttggattgagcaaacgagaggcttaatgcgttgcctgaggaaagcaatattgctgccaaaacgaatgagatactaaaaagcatcattttggttgttttcattgtatattcatcaatcaataaactatataatgatgatcaagtaaactattgagacaatttgctcaacaattttagatccggtcaaagtcaaacttcattttttgacattgaagataatcaaactaatggtagaatagcaaaagcatgacgatactgtaattgattttatatttatagatatttctctttcttttatttagaacctgggcacattatattctctcaagaatactgatatttttagaatatttttattaaaatagacatcgcaaagagactagccaattatctttcataattcatggggtctaagaaattggtttcaaggtgtattgttgatttggttctttattgcaacatactcaaatgaggaacacaaggtattgattcaagaattaatgtttgaaaagcattggaatgaagtaaaaagccttgaagttatgaataacaattagaggactagttcaatagtgttgaatggagtgatctttgctcttgatcaagtatgaaccgttttatttgaacccgtttctgtcacacactaaaaaagggttaataacaaattaaatatttataagattttagccttttctcatattaaattcattattatcctatctaaagttataagactataagggttttagaacttgtcaatcaatcttatttacttcttctccattgacagaacattatggataatacaagatatatccaatcaaaaacaaaaacatcatcagacgcaagtcatcttactaatgtacttctaaagaatatttatcgaaatacaaaaaagagcagagatatggtaaggatcggtgttataactacattaactgtggtattgatttatagtacgctaacatcatcgaacgcatttgctgctagcccccgagatatctatacaaatgatgaatgttattgtactaatgatccagaaactcttacagtagcatgttgtgaccctgcaagtaataagtgtatgacttgtcagattgatacatctacaggagattacatgctttgtacttcttatatcgacccatcgatgaatacagataatcctaaaaacgatgacggagttttagaacagcccccaacttcaccaaatgacaattctggttttcctaaagatggagtagcagagaacccccaaacatcacccaaggttcctttcaataaaggaggagtactgtcacaatagacttagattaagttcgctaaaatctttatttattgataacaaatcccgcattaaaagtgcgaagtgcgggatttgaacccgcgaaatcatgaatcatgttttataaaaccatcatagtgtaaaaagacaaaaatactaaaaaccattgaaataaaaactcttatattttcacatcgatattttggataggatgaggttcaaatcacaattgatatgcttccctcttgtttacgggaaatcatcagattaatagagatattttggatattgggatataatgaccaagacgtttttaatctagcaaatacatatattagaaatagttggaagatgcgacattcaaacaattgatggagtcaggtcaatcattccctgaagtaactgatgtaatttatgatgctaatcaaatggagaaattaattttaaattcagttgatgtagtaaatataggattcgatacaatttgggacaaaaagatattcgattttcattttaattatctaagagaaggatttgatgtattggaaaagttaattgaagaaacaagtctaaggatacggcttatagtcgagactactcctgaaaatatagaattcatcaacaacataaaatactatgaaataaggcatcttgacaatataagaactaattttggtataatggacgagagagcttacatgttatgggtattccatgaagatggtcaaaaacctgaacaggcttttttcagtaattcaatatccttagttaagaaacaacaaatgctatttgacaagatttggaaactaggaataccgttaagtgaaaggaacagacagttagaaaatgaacagctgcctgaatttcataaaatattagttaattttgtcgatgcccgaaccgaaattatgacttttcttgatcatagtaaaagggaactgcttatcctttcatcaattaaaatgctagactattttgcagatgatgaccttttttggataaaactctcattgttgtatagaaaaggagtattaatcaaattattaacggatggatataacagatcactaatttaccaactaaataaaattacaaatgaagcacatagaaagacccatgatcattttcaaataggatattctaccaaacttggaaatattgatgagtttgttttgattactgataataaggcccttgagttgacttacgcagatctaaatcaatataaaatatcgtttttaaatgataaaaaccatgtattagttcaggaaatcctttttgaaaagtactggaatgaggttaatagtcttgaagttatacacaacaattaggttgacaatcatgtagctgggattcctatatttggatagcataggaaaatctgatgaactaagcaaataatttgatctttgctcgggattaagtatgaacctctctatttgaatccgcttaacgctttggtaagttcaaatccaattgtttagagagagaaccagcgatccctctatctttagttatggtcgtagagtgataatttgatcaagataatcttcttacaagattacaccctctttatatacttccttgattgaatttggttatgaataatagtagacaggtaagaaaagattatcttttcattatagtattcatttatactctaattttctcaagtacaacttttgatcaacggttttactaatatagtaaatggtcaaacaaatgctacccagaccaactccaccaatactactacgaacttggttaacctacagaatattccagtagaaaaagtccatgttggagatattgaaatggcgtacaagatgtttggcaaaggagatcccttgatacttcataatggtgcttctgataatatggatgcatgggatccagcccttttaactagactagcgtcaaataacacagtaattatttttgatagtcgtggaataggaaataccactgcaggtaccgaaccatattcaatacagttacttggtaatgatactgctggtttaatggatgctttgaaaatacaacaggcaaacgttcttggatattctttaggtacatttacaactcaacaatttgcaattacgcatcctgataaggttagcagtattatacttattgctggatcatgcggtggtaaagatgggatacctaaaccacccgagtttttaaaattgcaggctgatattgtaaacaaaactcaaaataatataactgttcctcaagaagatttcaaagctctcgtaactgcatcattaggatctggttggataaaactccatcctgaatctgctgttattccagaaaacagttccttattagggtcaaagcccggtctttccgctgaagcattgaacaatcaggcagatgctggctggggttgggaggctaagaactggagcggtgtctgtgacgacctcgcaaagatagacaagcctctgttggtcataacaggtacagatgataaccagtacaatcctcatcagaatgccttagtcattgcaagtaaagttccaggagcatggcttgtacagataaaagacgctggtcatgccgttccagctcaatatccagaggaagtcggtaaaataatagatacattcttgtcgactgtaaaatagtgggagaccaagcggaaagaagaatccgatattaattttgtacgcaatatagacaagcgggttcaaatcaatcataaaaaagtgcgaagtgcgggatttgaacccgcgagtagaaaacccttcgatttaattcatacgatatttaagtgaaagccaaatattttgttaatgatatacttattcctaaatcttcaaaagaattctctaaatagcaagtttttaataaaatgcaactcatcacaatagtggatgatttaacatttagacagttaatggagtcaaaacattatcatccagaggttacagatgtcatttttgaatcagataaaatgttagaaatgggcatagttgctattaatagtactgaaagaggatttgatatagtatgggataaaataatgcttgatttcttgtggaagttttataaagttggtatactccttgctgaaaaacatgccaaagaaaggggtatcaaatttagactaattgttgaaattacgaaagaaaacatggagtctgttaaatcattcaagtattatgaaataaaacatattgataatataagaagtaactttgctgtattggataacagagcctatatggtgcaaatatttcataaggaaaatgagcctcctgctcaggcgttatttagtaatactaaagccctagtagatagtcaacaagtactatttaacagattatgggaaattgcaactccaatagcaaacagattaaaagagatagaatatcgtgataaattaaactaccagaggattttaacaaatcaaagaaattcataatgaaatagattctttaacagaacaatgtgaaaaagaattactaatattttcgtcattcaagttaatttatactgtacttaacaagaataactttgtaaataattttaactcattgctaagaaaaggtattacaattaagattctcaccgacgatattgatgaacatttaatgagtcatattgctcaaataaatgaaacaaataaagataatccgatgcagtttgggtatagcaacaagttgggagaatttaatgaatttataatgttaagcgataacaagtatgtcttgcaaataaaatatgaccaacaaaatgaaatagttgcctcattttcaaatgaagagcataatgtaatgattcaagagattctatttgaaaaatattggaatgaagtcaagagtcttacagtcattagcaataattagatagttttagattcaataattgaaggtcattaaaacaaggattgacaaaatgttgaacgcaatgatgcgctaatagtattgatctttgcgcgggatcaaggacgaaccgcctttatttgaacccactaacaattattaaatgataatctcgatgctctcaacattaaccctctaatgttataataaggtcattggactagataagatgcggatttgcatagaaacctttgaaagacaataaaaatgatttaaggtaaattaaattcattatggaattttatggtgttctaatttaataatccacctaatatgccggttgctttttctgttagagatgagtcggatgaggtagaatcatttgttgttgatactgaactattattagttctttgactattatcatttcctgtcagtaactttgttgcctcatctttaagagtggacaaatcctgtgctaatgccgtctggcctaatgaattacttactagcgatgctgtcaatacaaatgacagaacaaaactcgcgattactaaaattttcttcatctttttcaaattgtatgttcatcatattatataacagatacaacattgaacaaagttatcaagagtatttcatccagatatcagagtgggaagttttacaataccaataataaatttaccattttcatttagcgtgagaccgattgattagaaaacagaaactaggtagacagatttgtagataagcggattcaaatcattctcaaagaagtgcgagatgcgggatttgaacccgtaatgtttggattttggtcctacaataaaggtgctataaaaaatcaaataatgtaataattcattgctttaatcaatgggccctgttaacttaagtatttgaaaaagagtaaatttgagttgtcactggactaaacgaggcaatatagacaagattccgtgtattttgagcacgatttatgaccctttgttctgaaacgattcatcttaatcgatatgaaatactgggaagcatttgaaaaattacattaagtttacagggtcgcgcccaatcatgcaacctgtaaataatatgctttaggagaaccatctgttaaatgcaaaaagataatggaattgcaagtgaagaggtaaatcaagctaacataaggttttaccgtgcttttgaaaacctatctatcgaatcaatggacaagatatggaaacatgatgaaaatgtcgtttgcatacatccagggtgggatttatttactggttggttggcaataagagaaagctggacaacaatattcagcaacacagagatgataaggtttacaatcacaaacacaaaaattaagatctttgataataaaatttcagtagttgtatgtatagaaaacatagaaacaaaagatctatatagcggtcgagtgattaggacgggtgtgattgctaccaatgtatttgaaagaatggaatcaaattgcgagtggtcacttattcatcaccatggttctcctataacaaactacattccaccaaatacatcttctcactgatgattgtagttaaagggtttctctttaacgaaagcctcataaatatgattattaatttacaattctcttgaacataaagcgcaggttgtttctggagacagtagtgttttgcaaggaaacagcttactgtgtcaaaaaatgaaggcctctactagagacattgataaatcatgtcttcaaaataaagatggcaatacgatctaaacattaccttaattctaatttttgttttcccgttagagcagcctgatatgccccctctcttattttattttctgcttgacctcctgtcaagaagttggaaatctttccgatagttgttaatttatagtttatagtatgattgacattcgtagaattatttccattgctttggaattcttgagtgctctcccattcttgaaatggcccttctgtttgttttgtaactagccttctattcggttcatttttaactacttctaagatcatttcatcttctttacccatatattcgcctgtcactatcatttctgaaccctcttcgctttttttggtagattcattttctgattcttttaaaatgtcacttggccataactctttaatagtgtctggatttgtataatattcaaaaacagtgttaacaggtgcatctattttaatttgagtttgtattttagtcatacctattattacacagtatgttatataaggtagttgtattattttgacatagattgtcaaaaaaactaaaaaccatctcaatcatgaataaaaaaatcacacctgccaaataattcattgagtatacaaaaagtgcgaagtgcgggatttgaacccgtttattgttttgtccagttcaaatccctttattactattaaaacgaaccctcgatccctctattatgattatccgcacttcgcctaacttgtctacagaacatcagaaaattatatctaaaatctaaaaaggaatgagtaattctaaatctattgaatattcgtatcttctcttgttacattcatttccgccatatctttatatttatattcatggaaatgaattagacattcatggatatgtattcatgtaactcactgaccgagcagtattttttgagtattgtatcttttacatataatgatgagtgattatagatggaaatgaaacttgaattgattgcaattccggtaactgatgtggatcgtgcacgtgatttttataaagataaagtaggttttaatttagaccatgaccatacagtgaacgagaagctacgttttgttcaaatgacacctataggctctgcctgttcaatctgttttgggattggtatagctgacaatatgaaaccaggtagcattaagggtttacaaatagtagtcaaggatgctcaagccgctcatgatgagcttaaaatacgtggagtgaatgttactgatgtcgatactcaagtttgggggaagttcgtttattttaatgatccagatggcaacgcttgggcgctccaggaattacctcctcggggccaatttaaagtatagaggtcagaaaaatctatcgagcgttcttcaaataatagtacgattattagagattaaaacggggatttaaatgatttaggggctttaaactaataacagaataaatttaactaagaatgtcatgttgatcttaaacaataatttggactaaactggtttgtttcctaatttttcatcctttagtaacattctttcttattcctctataacctaaaatgcctatagttaacccactgacgagcgtatttaaaaaaggttaaccaatatgttaacccattggtgaaaatcccgcataaaatgactaaaatcagtgcgaagtgcgggatttaaaaatattgacttcttttaactcttgtagaaaagagtgctctgacaacgtttcttaatgacaggcccagaaaatacaaataaagaccataaccaatgtattctaaaggtgttctatttcttttaccaaacatatcaggaatagagcatcttcaaactatgatttatcgttaaattaacaacgctttattatgtattacaaatatatagattcatcgtgataatttaacaaaaagaggaagatgaataaaatgatttatgccaattatttgcaggaaccgtggttccaacctgctttgaatccctcaacttcttcctttgtatcgccgacagggctgtatttttcacatttatcatgacttgaccatccttctttacatccgtttatccaattaccagactttccctgttgttcacaccaatgtgttactgcggctgcagagtttacattaaataaagagggagccatcgccaatgatgtgatagttaaaaccatcacaaatatctttgatttagtatccattactatgactacttattgaaatatataaggcttagtaaagaatatcgccacatatctttcgaactatcttaccaagtccttagcgtgttttggatatgcatatctttttgataaatctcttagcaggtctgtagagtccacacttctataaaaagtaggattaaattctccagttagtggatcttttatacctctatccctaattctttcaatgagatttttaacttgttcgttattttcatgtttaggatattcccctttaatccaggtatgaacaaagtgactgaatgtatcaaatccattgtattttagtttactatttaaaatagctaattcattttcttttaatctaacagttacactcttccactcagcgtatttcctttgagtttgggtttgctcattcatacgtcttgaaagtcttactgagctttagctttttcgtcaacaatttacgagcggatgtcaacaatttaggttaaatgtcaacaatgtcaatcgtagaatatcgagaagtcaacactttggtcaacaatcttgtttagaggttctcaagctcgggatcaagggagcaaattcccgcactaaaaatatacaaattctcaaaatatttccatctaaaatcaaaaagtgcgaagtgcgggatttgaacccgcgatcccttcgcataaaacaaaaatatattaatagtgatatgatcccgccacttcgtaaagggccaacctcgcaatattcttttaattaatttatcaagaatgtatggtttagctatcaaactgaccttagatcttcagggcatactcagtattgatacgcgtaagttttgattcgacctctttcgccaataagattgaagagtaatgaaacaatctccatactaataactctccatcattctagcagttcaacaagtttccgacattatacatttgttctttacctagttcatcaagtaaattacagaccgacctgtcatttctcggattgttatatgacagtaagttctttatctggtttgcagcatctatagagtttgtcacattcaatggattctgaataatacctttgctaaagtcaccagttgtctttgggtcttcatttggtggtggtggagtattaacaggatttatggttattatcacttcatcaggttcgctcgatataccttcttcattagtgactgtcaattgaaacgtaagatctgtttgttcatttgtttcgggcgcaccaagccttgattcaaagatagtaagttggatcagataataaaggagagatcggttccaaccatgatacttcttcagtcgaaatcaatgtcaaattctatggaattattttcagcaaattgtattggattatcgccattattccataacactattccattcacgttgctaatcgttctagattcaccggtttccaagtctaatccttcctgagtgccagaaatagttgcttcatatagtgaattatttgaattagagtccccatcatccacaggcgctaattcaacctctatggcgtctgattcaccatcctcaaagtttgcagcgactagtttgagatcattatcttcaacgagatttaacttcaatgaggcctcatctaatttgcagtcctcaaaatatgcaataattttcacacgttcagaatctagttgaccagggtatagatctatagtatcagaaatatcatcgcaagtatcttgtgaagctctgatcacatctgaattgccgttattatcattatcattatcgccattatcatctgtttcacatccaataccatcgttatcatttccatcaaaaccatgggggtcgggcccatttaccttgaagttatggtatggaacctcgtcatcctcaaggtctccaccttggtcacagttgagatagggcggaggggaggggatgcaattatttggatatgatgggtcgcattgttgttgttcacaatctggatcttcagaatcagttaagccatcactatcatcatctctattattatcgcattcgtcaggtgtttctacacagtcatcaagatcgggattttgtttgcatatatcgtccttgtagccacaggtttttccgtcaggtctaaatatcattccctctggacatccatctgagtctggaatacatcttccagtttcatcatcatctacactatgatacccatctggacagccgtcacgatgatctggaacacattgttcatcctcattttgaaagaatccagcaggacattctccatcaacagaagcacattttggtaaatcaggattaaacaagcagtcttcatctggtccttcatcattcccctcaggattaggagtagtcacatttccattactatttccaccgttgctttcacaacctataccatcattatcttgatcaaatccatttggatcattagaggatactatgaagtctctatcagagatatcatcacaatccaactcttgttctccattattatcattcgaggaagtagatgaagaattgtcatcgtcataggttagagtagcgggattttgtaatgttggtgggattgtagttattggggatggagataaagatggatcagtggccgccgaggctgtagagtctgtactggttggtggtggtggtggtgtagagtcagttgggttcgtagagtctggattatcgctttcactactcctatcgctttcactactcctatcgctttcactactgctatcgctttcactactgctatcgctttcactactgctatcgctttcatcattgccctccccattttgagcaaatgcctgttgtaatcttaattgtgaagagggactggggagagaatacattaaactagataatgagggtgaactaaacatggaaacagatacgataagtatcaaggacactaacattaacgatttagcagataattttcgatttgaattatcactatgcatatttctgttacaatcgtaatctcatttctgtataatatctatttgataaatttgttatagatcaaatttatataagaattaaatattgcgttctggtttgtatctgattaacgaatttaattggaatatattgaataggtgatctgattgttaccatgtctatatattactagtctactctgaattccataatgctgaactatttgatgatttaataaaacatgatttaattcggcccctgcaaacgccataataacagtgagtatagttaccatatccaatgtggatatcaaagttgtaacctgtagatcatatgccattccatgtaaattttctatggtctgaagttatcatggttatggaaggtgggtttgaccatttgaattttttacgaggtctaccaaacaatgatagacaattaaaaacattgagtaagatagttagaacacaaaaattctgaacaatgctttcgatgagattttagaattcaagggttaaatcccgcgttaaaagtgcgaagtgcgggatttgaacccgctctttgctttgttaggttcgaatcctgaaaatagtggaaaatgaacccgcgaaaatagaaattctttcaatgattcataccaaactcaattgaaaattaaatattaacactattattatgattaaacctaaatcctacaaaataatactataaataacaactttttaataaaatggagttttgatacaatacagtggatgattcaacctttaggcaattaaaggagtcaaaagcctatcatccagaagttacagacgtcatttttgaatcagataaaatgttagaaatgggtatagatgctattaataacacagaaagaggatttgatatagtatgggataagataatgctggatttcttatggaagttttataaagttggtatactctttgctgaaaaacatgctaaagaaaggggtatcaaatttaggctaattgttgaaataacaaaagaaaacatggagtctgtaaaatcattcaagtatcacgaaataaaacatattgataatataagaagtaactttgccatattagataacagggcttacatggtgcaaatatttcacaaggaaaatgaacctcctgctcaggcgttatttagtaatactaaagccctagtagatagtcaacaagcactatttaacagattatgggaaattgcaactccaatagcaaacagattaaaagagatagaatatcgtgataaattgaattatcagaggattttaacaaatcataaagaaattcataacgaaatagattctctaacagagcaatgtgaaaaagaattactaatattttcgtctttcaaattaatttatactattcttaacaagaacaactttgtaaataatttcgactcattactaagaaggggtataacaattaaaattctaaccgacgatattgacgaacatttaatgagtcatattgctcaaataaatgaaacaaacaaagataatccaatgcaatttggatatagtaacaagttaggcgaatttaatgaattcataatgttaagtgataatagatatgtgttacaaataaaatatgaccaacaaaatgaaatagttgcctcattttcaaatgaagagcataatgtaatgattcaagagattctatttgaaaaatattggaacgaagtcaagagtcttgaagttgtgaatagcaattagaggactagttcaatagtgtcaaatggtgatcattgctcgggatcagggatgaatcgctctatttgaacccgccatttctcatctgagactcgatttggtttatatactccgtcgagtgaaattggttatgaataatagtagacaggtaagaaaagattatcttttcattgtagtattcatttctaccataattttctcaagtacaactttgatcaacggttttactaatgttgcgtatagtcaaacaaatgctacccaagcaaactccacaaatgttacgggcttagtaaatacagaggatattccattagaaaaagtccgtgttggagatattgaaatggcgtacaagatgtttggcaaaggtgatcccttgatacttcataatggtgcttctgatcatatggatgcatgggatccagcccttttaactagactagcgtcaaataacacagtaattatttttgatagtcgtggaataggaaataccactgcaggtaccgaaccgtattctgtaaagttacttggcaatgatactgcgggtttaatggatgctttgaaaatacaaaatgcaagcattcttggacattctctaggtacatacgtaacgcaacaatttgcaatcacacatcctgataaggttagtagcattatacttatttctggttcctgtggtggtaaagatggtatacctaaaccggctgagtttttaaaattgcaggctgatattgtaaacaaatctcaaaataatgtaaccgttcctcaagaagatttcaaagctctcgtaactgcatcattaggatctggttggataaaactgcatcctgaatcgcttgatattccagaaaatatgacactagcatcaacaaagcccggtctttctcctgatacattgaacaatcaaaacaacttgggtgtggcctgggaagcaaaaaactggagcggtgtctgtgacgaccttgcaaagatagacaagcccctgttggttataacaggtactgacgataaccagtacgaacctcatcagaatgctttagtcattgccagtaaagttccaggagcctggcttgtacagataaaagacgctggtcatgcagttccagatcaatatccagaggaagtcagtaaaataatagaaacattcctgtcgactgtaaaatagtgggagaccaagcggaaagaagaatcggatattaattttgtacgcaatatagacaagcgggttcaaatcaatattaagaaaagtgcgaagtgcgggatttgaacccacgatcccttcgctttattgtaaagttcaaatcccgaaaataaaagatgagaacctgcgatcgctctgtctttagtaattagttatagagagagcaataatttggccaaggtagtcttcatacaagacttcaccctctttatatacttcctcgagtgaatttgtttgtgtataagaaaagacaggttagaaaagatcatcttttcatagtagcggttttatctactttaattttctcaagtatgactgtgatcaacggttctactaatacagtgaacggtcaaacaaatgctacccagaccaactccaccaatactaacaatttggtaaacatacaagacattccattagaaaaagtccatgttggagatattgaaatggcattcaagatgtttggtaatggcgaccctattttgcttattcagggtgttggtgggtctatggatgactgggaaccaactattttaagagaactatcctcaaatcatactgtaataatatttgataatcgtggagttggaaatacaactgctggtacaaaacaattctcaattcagcaatttgcaaacgatacagctggtttactagacgctctgaagattcaaaaagcagatgttatgggacattctatgggctcatttatagctcaacagcttactcttactcatccagagaaggtcaacaggcttgtacttgtttcttcaacatgtggtgggaaagagaatatacctaatacccctgcagatttagaactggctaagaagttcctcagtagtattgtaaataacacttcaatagaaccacaggaaataaaaacggctgtatctctcggctacggaccaacatggatcaaactgcatcccaacctccttgaaaccattccaacaaaccccaaagatttgctaccttctggtatgactcttgatacttatttacagcagaacaatatagtacaaaactggaagtcaaccaactggagtggtgtatgcagtcagcttccaaatatatccaaacctaccttggtaatgactggaactgaagatgttactataccagctgctaattctttaattattgcagaaaaaatcccaggagcctggcttgtacagataaaagacgctggtcatgcagttccagatcaatatccagagaaagtcggtaatgtaatagaaacatttttgtcgactgtaaagagtaggtgaccaagcaggaaagaagaatccgacattaatttttgtacaccatcttgacaagcgggttcaaatcaatctcaaaaaaaagtgcgaagtgcgggatttgaacccgcgatccctccgttttattgtaaagttcaaatcccgataataaaataaaggaccacgagatcctactcattttaaagatcctttccggattatttttgatttgagcaagaagaatactattggagatgatacggaaaggatgaagatttgtttttcaccgaagttgactgacttttattctaaaaatcattgtttgtttatatatagagggtttattactaatgttattgcttttaataagatttaagcgagaacccttaatagtttttggaatattttttggtacatttttaattttagtgacttatttattatcgtctggttcgtctgtgtttcagaatgcgttggcacaacatgatattcaaacggtcaaatatagaaatctgactattgatcttgataatggattaaagaccaacgctcaattgatttttcctgctattggaaaaggaccataccctggtgtaattatctttccgggcgctggtgctggttcagtaattacaccgtcatatggcaaggtaatattctatggacatctagctgagtatctcgcagagagaggatttgccgttcttaaatatgacaagaggggtgtggggtcgtatctcacgatatcagatagtaatgcatggggcaatcttacatttgacaatctgaagcatgatgctgagaaggctttatcaggtactattacaacaacctgaagtaaatgcaactaaaaaggttactttgattggacacagtgagggtattaccttccctccaagaattgccgccgaaaaccccgataaagtcagaaatatagtcctaatggctccagtagctgaaaaatggactgatattatatatttccaagaagtcgctaatcctattctttatgctgagaacatattagataaaggtcatcctggacagatctcagtgaaggaagcatcaaaagatcctatctttcaaaagttggttggtggaaacctaactcaacttcttcttaacccgactcacgttaccggtaataatggcaccgatattttacctgaacaaaaaaacaacacgagtgatgacttgattagtattgaaggtgtgctaaagcctgcacttgtaagaggatatgaaaatgatacatcaccaaatacctcaatgctgtcagccaaatgcgtaagcgtaattggttgtcctagtattggaaaatctttttctgccctccctagcgtcatcggcatgatagggaacgtatcttcaaatattagtatacttaccctagaagggcaaaatgatagtcaaacccctcttcaacaagcattgttattacaacaaagattaacagaagtaaatcatcctgaccatcaaattattgtttatccagatcttgggcataattttattcctagcaatcaatgggtaacctcaggtggtcatcaaatggaagaatatgtattacaggatatgtatgaatggctcacatctcccgcaagagaggtcaatcaagaagcacggtaatgaaatcgaggctgattctgaagatgtcaactatatgatgtgatatagtgagtataatagagtggattttttgatgtagggacagtcggtttagagcagcatggttttatagattaatacgctttttagcctgcaaaccagatatatctctgcaaatgttattgagatcccccacttatgagactcaaatctctttttgtacaaattctaaaggattacataaaacacaataaattaatttgatatcatggtttccaggtcgcatggtgaacgggttcaccatgaggatttaaatccctttgattattgttggagaagagaaccttcgattcctctatcactagtttttggtattagagtgataatttgaccaagataatcttcttacaagacttcaccctctttatatacttcctcaaatgaaagtgcttatgtatagtaatagcaagataagaaaagatcatcttttcatagtagcggttttatctactttaattttctcaagtatgactgtgatcaacggttttactaatatagtagacggtcaaacaaatgctactcaggccaactccaccaatactaacaatttggtaaacatacaagacattccattagaaaaagtccatgttggagatattgaaatggcttataaaatgtttggtaaaggagatcccttgatacttcataatggtgcttctgataatatggatgcatgggatccagcccttctaactagactagcgtcaaatcatacggtaattatttttgacagtcgtggaatcggaaataccactgcagggaccgaaccgtattctatacaattacttggtaatgatactgcgggtttaatggatgctttgaaaatacaacaagcaaacgttcttggatattctttgggtacatacataacgcaacaatttgcaattacgcatcctgataaggttagtagcattgtacttattgcgggttcctgtggtgggaaagatggtatacctcgacctgctgagtttgacaaattacaagcaggtattgtaaacaaaacccaaaataatatacctgtatctcaggatgaaatgaagtcgcttgtaacggcctcattaggaccgggttggataaaactacacccagaatctgcagcgattccagaaaacatcacattccaggaaatgaaacctagtctttccgctgaaacattgaacaatcagaaggaagctggatttgcttgggtggcttccgactggaatggtgcttgtgacgaccttgcaaagataaacaagcctctgttagttatagcaggaacagacgataatctctacgtcccacatgaaaactctttagtcattgcaagtaaagttccaggagcctggcttgtacagataaaagatgctggtcatgcagttccagatcaatatccagagaaagtcggtaatgtaatagaaacatttttgtcgactgtaaaatagtgggagaccaaacggaaagaatccgacattaatttttgtacaccattttgacaagcgggttcaaatcaatctcaaaaaaaagtgcgaagtgcgggatttgaacccgcgatcccgagcttgggaagctcgtaccttaaccaggctgggccaacctcgcctgaaataaaattaactagacggtattaataacttaatgctgggctgttatttacaactattccatattttcccctttctaaaagcaatttttctagcagagctaatatcacgtatcccacctcggtttttttccgtaccttgccttattgaggttccatactcatctacaatttcaataattacctcgtccttgaaatacgattttagaattccagctatttggtgagatagagccaagcttccatcaccaattctaactattttagttggagactcgattgaggataaaacaaagctgattttttcaactgtggaattaaccgaagacaaaactattctatctagttcgaaatagcagtacagtatagaaatgccaatcctttttccaggatctattccgattatcaattgttctttagatgaaccaaagtagcccatgcaattttgtagaattttcgcttttatggacagaggaaattcttctaattgggtatccaaatacatgttatctctatttacgattttggattcatcgatggttgtaattataattttcccggttgatagcgccgcttcttcaggtgataatgacaaataacgtaagtcaagcgacttcaaaacatttgttattttataataggaacggcctgatactgtcgcaacaataactggtggacaacttgttaagttgaacatttctattgctactttagcgtgatgttataagcctattaaagattacgtataatttttgggtaatcaaaatgcaagaattacataaatttcaaatgatccaaatccaaatataatcacgtagtgacttttctgaagttaaaacacagattattagcgtaatgagaatcgataataaatacaacatttttaaatgcaattttataaaaatcaatcgaatatcgaataatattctataatttccaaataattattaatactttaaaattataatataataaaattgagtcttttcgtacctaattagttgataaaagagaaagtgtttgttaaactgtcaaattaagtattgcttgtgcgatatcgcccttggtatctgtcaaagcaacgatcgctttttcttttgagacactggcttgttgcataactaaaacaatatcttcttccttaaaagaaggaacgtccctgttagtttcttctatatcggtagcaataacctgaaaaatagtactatctttgcctttcatttcaacaacttggggttttttaagaaatatttctttcatatcggttcttataatgacttcctctaccgaacctaaatctttcatgtctaaacccatccggtcaagcattctgcgcatatctctattgcccgatcgcatcatagaattccctaagtacttctgctttttattccttctctaatttttacccctatgccacggataagtgtgcccatattatgatcagcaatatcatctaatgattgtaaatagtaagaaaaaggtaacaaagatcgacctacagccaaaacggattgatttttgtctataactgcaacatccgacccgcttttcacgttctcaccacattttagcacatgttttacaaagagagatctaccttccgatacgaaaggtatagcatcttcaacaggtataacacaattggatttataccccttttgatttagaaaaagtttggcaccgtcaatagttaatgcaattcccccatcggttcgaaaggttccgattaattttccatctatgctaaaactcttgattttcccagtttttctagaatattcaagctctaaatcttttggaagaattgagctgatatcccttccaaagagaaaatccacatgagaacatattttctgatacggatttagaaataacttttgcaattaacaacctaacttgagatatctacaataaaaaccatctggattgccaacttataaggaacctctggagctaatatgggattattttaccagtcaaaaattaccctggataatgaaaatcgtcaatattttatcactagttataatttttacaatattttgactatattttgcaaatatccgactgtaattagggttttgtaatttccttattatttcccatatgtcaaaaacttagtacaaactaattaaaggttcaacgttcctccctctttgcatatcatatgtcaggtctaggatacgaatgttataagggagaattcaatatgtgtacatacatgtattattggttaattaatacagtatcggtatgccttcgtgtcgcttaataaatatagcaaagaataatgacatagcctaataattgatatattaaactaattataaggtccatcagactgatgggttcaggtttgtgtatcttgcttccatcatgccatattcagttagagaatttggcattcagataaaagatagaaccgatagtgtattcgcttacccggattcctattggtcaggggcgaaaatttaaggtttttgttacagcctgcaagaagagaaataaaactaatatcaatatccttgttgctgtcacatactgtaggctgtgacctccttcaacagattattacttttatactataaagccagtatggacaaatcaaaggttagtagaaatcatgcagccatttgatcttatttggataaaccatgagcagacggcctactaaatggatatcaggaaacaaaatcgaatacatgtttagaaatcaaccagttgtagataactctcgttagttgcaatatacccagacatgaacaacagaaagaaaagtatgacgccaaagacgccaaagacgccaaagacgccaaagacgccaaagacgccaaagacgccaaagacgccaaatcctaataaattagaaccgattagtacatacatggcttctttttgtgaattatgcggaaaacataccgaggtaagcaagaaagtaataattgagaaatcaattatgagtgtctgtttgtcttgttcaaaaagaggcaaagcagtagaatccaataatgtttcaaagaacatgggtccaacaaaagtgacaacccctgtaggatatttatcccccaaacctgcacctggcccccaacaaggttcaaggaatctttatgccagaaaaataagagcacctccaaagattaaaccaccacccttaaagaaaatcaactgggttgatgaactgattcttgatccggaatttccatctttaataagaaatgccaggagtaaaaaggggctaacacacgaacaacttggacaaaaaattaacgaaaaagtgacactgataaagaaaatcgaaacaggttcgataaggcctgatgaaattatagcaaagaaacttgaacggtttttgggaataacgctatttataaaccccaatgaagagaacgtagaagaatagaatagtaaaagcaacaaaagatgtaatcttgttattttttttataaatctccattggtgactgaaaagatgatagcagggtcgtgatgaagattagctaatgactatgccaccatctgtagcagtacttagaataggacacagactggtaagagatgacagaactactactcacgccgtgttggtatcaagggctatgggaagcgaagtaatctacatgactgatgtggatgatgaaataaaaaaaacactagataaagtcaataaaagatggggaggagaaaaagaatttagacttgaaatcattgacaattggaaaaagatactgaaaacatggaaagaaaatggcggcaaaattgttcatcttacaatgtatggagcgccaatcaatcaaaaaataaaagagatcaaagaattaaatcaaagaatattagtcataataggagcagaaaaggttccaaaagaggtttattttcttgctgattataacgttgcaatcggcagtcaacctcactcagaaattgctgcattagcaatttttctagatagaatatttgaaggcaaccagtttaacaagagttttttggatgaaaaaatgaaaatcataccttcagataagggaaaaaatgtaataaagaggaatcagggctactcaagtagcaacaataacaacaataacaacaataacaacaataacaacaataacaacaataacaacaataacaataacaataattccaggtctaaaaataaccaaaattaagaggtagttaaagatgcatactactgctatcgcaaattgggatgagattgtaaccgtgaaatcactatgacgttagatgacactcataaaaagagaacagttaatcgattcttatataattaagttataataaacaacaccacaagaaataaaaaaaaacaggattatatgatagagtcaatgggtgatacacagcttagggcaaaaagaaccaggatcaagatattgagagctattgtaaagaagaatggatccgcatgtttttctgaaattagaaccatcacaggtctatctactggatctatctattatcacctagaaaggatgaaaaattatgtattaaagaattcaaagtattatgtcataactaaggaaggaatggatttgttggttgaaatagataagagaaaagatttcacattatcgacaaaactaatttgatttaatctgcttgattcgatttcatgcgagtaaacattcttttttttcaaccattgggactataagattaaaaaaatcaagtcgttattaaaccaattttggatgattcaatagccctttttatctccaaggagattcgcctccccatactcatcggagtctcaaacaataaatctgaataaggtgaacccgaaacgtacaagtttgttccagctacgatgcgcgctgaaaattcaaatgctatgaaattagcattattatcataaacaccttcgatgcaaaagggtccaggtattcccggcgggactaattttcttgatgattcaacaaatcgttcgcccatggagtaaacctctggaagcaaagattctcttaggacgatcggcatatttcctacaacagtataagacggctgaatgttagaagttatttgatactttgatgggattcgccctattgcgtctatatcagtttcataacgtctgtctatccctaataactcgagttcattggtaataggtgaataaaaatattgtaaataaactgggactccgttagcatatttttgtataaacaaattttcctcggactctattacatgtgattttatgagtttttgtgcctgttcttcgaatccctttttatcagtgaccaagaaatacccttttcccccagctgctccatgtaatttcactatacacaaaccattgatttcattcttagaggatatttgagtcggcgaaggtaactttgattcgtccattaattgttgttttaacattctatctgattcccatcttaggatccatttattaccaaatatgggtatcttaatactctctagttcatccatatttaatgtagaaatcaaggttccgtgagggatcaatattggactaaacttttcaattaatccgtcttgaaaattcttatttactatttccttaaaatttttaatcgatacaatattatcaataaatttaaaccgcttgtacatgtcaaatcgtttttcttcacatactaacaaggttttgaacccctcatctttggctcctttcaatacctgtaatgagcaatgtgagcccaaagtcataacagtttgtttatcaacatctttatcgaaatttctttcagctttttggtcattcatgatccatatcccgtttattaattggaattttatcggagattaattttatttgtttctcatcaaatctcgcacagaataattactttgtaattagatatgaaaaagagagaagaacaagcaacgtatgatgccattagcaccatagacacacaattagtaaatattagtcaaaaattacttttaatgagtgaatgtctaaagaagggtacagcgtaataaacaggaaggtagtccatgagggcccagtaaggttaagaatagatacatttaactataaaggaaaagtctttagaaaggaagtagttgagcatagtccttctgtcggaattattcccatcattaataaaaaagagattttgttaattaaacaattcagacatgccgtaaacaaatatttaattgaaatacctgcaggcaagattgaaagtaatgaattaccgcatgaagcagcaaaaagggaattagcagaagaaacaggatatgcaggggtactaaaaccgcttactcgatgttttttggctccaagctatgacaccgaattaatgcattttttcgttgcagaaaatatgtctaaactggagaatccaaataaaatggatgaggatgaaaacattactaattttgttgttgaattaaaggatgctatcaaatattgttatgatggtacaataatagactgtaagacggttacggcaatattcctatattattttaccctccacaatgatagtgtatttagaaatacctagatttgatataatcaataatttcagataatgaagggttatcaccaaatggatttcctacgtggagtgaggataataaattggcaaaacaaattttctctatagttgtgaatccataaagatgtccaaaaatgaaaccagcatcccatgaatctcctgctccacttacaatatctattttggatggaacaatagagtttacaaataacgattcttgaccatcagatattgcagaacccttagttgtatgtacacataccgttaaattaataaaattagcaaggaactttgctgattcgcaaagggcgttaatattattaggggataaattgctatcaaaggtcaatagagtactattgtcataaccaattacgctctctaatgctttgattatcagattatattcattttcattgatacttagaaagtctactaatttagaacgactttttagcacattaataaattcaaaacatctcctttcgatatcagcgggatccaaaaaatgaatcgatttaggagaatttgaaaaggtataatctaacaagtcggttcctcttagatttgacgcccaatttgtcattatcacagcatcagatgttcgcaaaatcatccttacttcttgtgattcaattagttctgggccaaaattatcgttgtcacctacatcacttaccatcacatttgaggtggggttggaggcatttgaaaattcaaatactgtcgataatccatgttttcctttcataatgtgaagatttacgtttgtcttgaagggcaaaaatacagaacgcaaaatagcagaaccaatttcatccgctatggtaaacaaatctacgcgaacatcgagttttgctagactatatgccatattgactgcgttaccacctttgatatccacactagaataccctcgcatacttccacctcccgcaacaatctttttttggatatcattcataaaaatgggatagtccaatacttcaataattctatccacaaaaaaatcaggcaaaatggtaacctgtggttgatgatacttatcttcctttatatctgaaagtttgatcaacaggtttctgagaatatcaagagtatgggaatccccaaaaatctgatttgtcaaactctgcctattttccgttttaactcttctgtcagactggtttgtgttttctttatgaagattttgattatgatttggacgtggaaatgaatcattacccgtagaagaaaaaatattttctaaagactttgatgaacaagacaaatctaaaaacggtgatgagagagagctaggaaatggaataggagatgcgggaataaaagtccaaggattcacggtatgaattttgaattttgataaatataatggtatcagaaaggcttaaataaatggaataaaacggtggacatgtataaaaaaaattaatcttttttttgcagaacaaacgaatggattagtccatatccatgccgcccatgccgcccatgccgcccatgccgcccatgccgcccatgccgcccatgccaccaggtggaccagcgggcattcgagactttgtggctgcaatgacgtcatcaattctcaacagcatacaagcggtttcagtagctgactttatgatttgttctttaattacagttggttcgagtatattatttttataaatatctgaaacaacagctgcctttacatttataccgatccatttggatccctttgattgttttgccttcaattcagccatagtatcaataggatccataccagcattctctgcaagggttaaaggtattacttctaatgcttcagcaaacttttgtgcggccaattgtgatcgtccttcgagactgctagaccattgtcttaattcattggctatgtatgcttcaggtgaaccaccgcctgcaactatagatggtttttctaacacatccttcataaccatcaatgcatcatgtaaagatctatcagcttcatcaactactctttgtgatccaccacgtacaagaatggttactgcttttggattcttgcatccttctatgaacacccacttgtcagtttcaacttttctttcttcaactaaattagcgattcctaaatcactttcactcaagtcatctagattatttaccagtctagcgcctgtagcctttgaaagtttgaacatgtcgctttcttttactcgccttactgcaagtacatttgctttagccaaataatgttgtgcaatatcatcaattcccttttgacataatacgacgttagctccaactgattttatcttgtctaccatatccttgagcatcctattttcttcttctaagaacatttgcatttgctggggctcactgattctaatttctgcactcatttcagttttttcgatttcaagagcagaatttatgagagcaatctttgcgttgtcgactctctttggcattccagcgtgaactatttccttatctaaaacaattccttggatgaatgttgtatcacgtatagaacctcctgctttcttctcaaccttgatattgtctaaatccactcgtaaaccttcacctgaggtatttttttctgtaatttgtttggcagcacttaccacaatttcactcaatatgggactatcatcagataccaatttagattccatgctggtttttgcaattttgataagaagatccttatcattgacattaacttttattccaattttatttaggataactagtgcttgctcagaagctgcagtatatccatctacaattgcagacggatgaacatctttactcatcaattgttcggctttttctaaaagcgcgccggtaaaaattacagatgaggtagtcccgtctccaacttcgttatcgacggattttgcaacctctaccattattttagcggcaggatgttgaacatctatctctttcaaaatagttgcaccgtcgttggtaatagtgacatcacctaacgaatccactagcattttatccataccacgtggccctaaactagaccttacaatttccgctactaattttgctgcagaaatgttatttttttgtgcctctctgcctttattttctttagttccttcttttaatattaatactggcataccaccagctgtttgttgaattgaagccatgttctcatatcaccttaatagaatggtacaatttttcggtaagccccttttataggtttcacaaataaaatgccaaaaaagatagagatccagaccaacaaatgatttatcaaagcaaactgaataattcttatggattttgacataaaattaggaaccaaaaatgaaaggagaattaaagttagtcacaatcagaccacaagttttctttgggaaggtgaaaacgtattctcgacaccttcaatgatatcagaaatggaagaaacctgtagattgttattgaaagagcaatttctaaaggttgattcagaatgggattcggtaggtaccgttgtagacattaatcatactgctgcaactcctgtaggggcggagataattctgaaagccgaaatcataggagttgatggaagaagagttcaattcaaagtatctatagaagacaatttagaacagataggagagggaaagcatgaaaggttcattatcaatattcccaaattcaaagaaaagttcgacttgaaggtgaaaaaactagctgaatttcaaaaaggatgagcgagcagaagtctagggttgatttgtcctgattagaaaaaaacaagaaagaaagcgatctagtgaaagaacgcgtctaccataaaagcaataaataatgctgccaaatatggactgctaaatttgaatactaaccaagaagttttttcacttggttttagcaataaccacacagacaaaattatcatcacaataccaaatacggtagcagtcaatagatatatcaaaccaaattgattaaagaaaaatggcagtatactaaatacaaccatcatcaaagttgttagtgctataatccttacagatttagattcgcttgatacaacgggaagcattggaacattggcctttttgtaatcttcttttacatgtaaggctaagctccagatgtgtgtaggaatccagaaaaagaccaatccggccattgcaatgcctatttccacatgttgaaatgttattgcaatatatccaattaatgctggagcgccaccagaaaatccacctaatataatattagattgactggttctttttagccatttgctgtatactatgatgttatcaaataagccaaatgccattaacccaaatgcccatatgtttatgaaccaagaacaaaccagagaaattcctgttaaaatgagcccaaaaattaaagcgttacgtggagaaattcttcccgagggaatcggacgacctttggttctttccattattgcgtcaatatctctatcgttatatcctgtgagtgtatccgcagctgctgagcctgctgcgattgcaaagaacaataaagcccaagtcatccaactgacctgaacatcaaataaccaggatgctgataccgcagcagctatagctgtgaaaactagtaaataccaaatttttggttttgtaagctcataataatttttaacttggttaccaactgtcttcatctctaaaaccaaatagtctattaacctaccaccatattataaataaaatagttatttatatcttgagagaactttttttatttagatacagaatttgatattatttctcttgaagtctttctcatctcaataaatgtttcagttttctgtaccccttcgatccgtcccaccttttcagatatgatttgatgcatttcatctagagaacgagcagtcatggttaccaacacatcaaatcttccagtaacttcagctacttctctgacctcgggaattttaaaaagctctgcaagcacattatcccttaatttagaatccatggtaattccagttagtgctttaacattaaaacctaaggcttcatcatttattacaatagtaaatttcttaatcaaacctctctttacaagtcgcttgattctactataaactacagacgaattgatattgattttttttgaaagcctgggaaccgatatacttgcatcttttgacaactcgcttaatatttttagatcaagatcgtcaattcttcccataattttcaaaatatactattttttcgtggttaataaatgtataatttttatttttgttataaagtttgtttatttttaaaaaaatttatataattttttttgttttgaacaactcggctaataatactgctcctttcgccgaacccattttttcattgtgagtcagtagaacatactttataccattgtcaaacacggaatcttttctcagtctaccaaccactgtggtcataccatcgttgatttctctgtctactcgtggctgaggtcttgtaggatcgtcattgacaacaatgtaatctcgtggagcagtaggaagattctttatggatacattgtcagaaaattccatcattttctttttgactgacaaggggtctacattctcgattgtctctacaaaaactacctcagtatgaccatcagacactggtaccctggtacaggtgcaactaacctttacatcattaacagagatttctttagattctgtatcatatttacccaatatttttttggtttctatttgaactttttcttcctctttaggaatgtatggaatgacattgtctaatatatccaaagcaataacaccaggagacctacctgctccagacaatgcttgcattgaggtcataaagacgcttttcactccaaagctatcaatcaaaggttttagagtaatagcgagcccagtagtagtgcaattaggcattggggcaataaagcccttccattgacgctctttctgctgtttttttaaaagatcggtgtggtcatcattgattccaggtatcaaaattggaacgtcgttttcgtatctaaaagcagcagcggtactaataacaggaacatgagcagctaactttggttctatgatttgtgcgtcatcagattccaaagcagtaaaaatcaagtcaaactcctttgggtttatgtcgtcaaatttagatatggttttatctctaacatattcagggatttgttctcgattatgccactttagtataccagactgaggatctctaattgcgtccacatattttttgccagcagatctttcagaagagacaatatgagttaaattaaaccaaggatgtttgtcaagtgcaactacaaattcttgacctacagcgccagttgaaccgattaacgctacttttaacatattgaaatggttagaaataaaacaattaataatcctttttaaagtgtaaaaaactaaaactattatacaatagatgaaaagatctttccatactaaaaaaaaagataagaaatcatctgattgaatcgacattgcaacattgtcatcatggtggaatctattctgtaaatagtcaaaagaatataagaatagattttagttcaaacataaatcctcttggaatttccaagaaagtttttgaaaaattaagaaccaatatcaaactagcctatatttatcctgatccaaaatgcactgaattgaaaaaaaagataatagagtatatcgattgtgaatttaatctcgaagtaaatgagaatttaataacgggaaatggcgccacagaattaatacattatttcgccgctgcttttgcccgaaaaaaaacacttattccaatacccaccttttgtgaatacgagcttgctgcaaggcgtaggaaatcaaaattggtatttgtaccccctcttgacaataactttcaaattgattcagattctattgcaaagctaacaaacaacccagacaatgaaataggatcagtattcttatgcaatccaaataaccctacaggaaagtttttcagaaaagaaatactagagatactagaaaagatcgataaaaagattccaatcctgctagatgaatcctacatcgaatttaccgatactaaaaaggaaaacgacaataactattttattaatctaataaaggattccaataatctagtgattttaagatcgcttacaaaaacattcggtctagcaggtttgagagtaggctatgcgctatcgaccaacgagaatattcaaaaattaaacaacaatttgattagctggaacgtaaacggattagcccagattgctgccatagaagcgctaaaagacaaatctcatattaaagccgccaagaaaaacaacatttctgaaaagaaaagagttttcaaattgcttgaaaaaaaccgaaaaataagggtaatctcaagtgatgttaatttttacttgatcgagatactaaatgagaaaacatccacagaactaactagcaaattattaataaaaaacggaatcctcgtgagagattgcaatagttttagaggcatgaatgacaaatttattagagtagccatcaagactccaaaagagaatgatgtccttttagaatcattggaaggagcactttgaaatcaaaactgataatgattcaggggacgtcttcgggagctggcaaaagtatgcttgttactgcactatgcagaattttgaccaacaaaggattcaaagtagctcccttcaaatcccaaaacatgtcctcatttacacataaaatagaaaacacagataaagtgatagcaaatgctcaagcgattcaggctatagcaagtagagcgattcctgactctaatatgaatccaatattattaaagccaataggtaacagcaagagcagaatatatgcaaacggtgaattcttgtcggtaatggaagctaaagattactattcagattttgttctcgataaaggttttagaatagcattggacgcattcagagaattaagaaggaaatacgaaataataatattagaaggagcaggctcacctgctgaaataaatatacaaaaatacgacatcgccaatatgatttttgcagaaaaagtaaatgcaccagtaatcctggtttcagatattgaacgtggaggatgtttcgctagcattgtaggaacaatgatgttgttaaaaccatcacatcaacgattagtaaaaggaatcataattaacaaatttcgtggagataatacaatattattccccgcgataaaaaagatcgagtcaaaaatagcaaaaccatttctaggtatcgttcctaaaatatatcacaatatcccaaaagaggactccttagacagagataataatgacaatgaaataaaacagggtcagaatgaaaacaaaaacaagagaacatatgtccgatcgatcaagaagaatgacaaaataaataatcatcaaaaaacgacagatcagtcagatttagacgcagagatcagcaggtttgcagaaaaagtagaatcatcaatcaacatggattatattctaaaaaaaattatcagataaaaaaatcaagccatgtcacttgaaatcgtaacagaaatcatatcaatcttatttatcgcgactttgatagacatcaccttaggcgaaccgccaaataggatacaccccgttgtattgattggtagaatcataaacttcttaattaaaataataaaaaatgcttctaaatacatgaaagataaagataaagaaaattttgaaaaggtaatgggatcgattttagcattaggattaacagtcatggttagtttggtagtttattatatttgcatgcaatcactttttttgttaggtattattttttttgtcatagtatcggcagcgttgttaaaaacaacattttcaataagagctatggataaccatatcaaggagatcttggaggaattagacaaaaatgatttggataaagctcgcagaaatttatcaaaaattgtcagcagggacacacggaatctatcagagtccagaattttatcagcttgtatcgaatgtgtagcagaaagctttgtagatggtatactctcgccactattctattatggtcttttaagtattccaggttctatgatgtatagaaccataaacacattggattccatgatcgcttacaaggatgactactataataaagtgggatggatgtcagctaaacttgataccatcgtaaatgccatacctgcacgattgtcatcagtttttttgattatcgctatgatggtttgtagacaagattggaaaaatgcaataaaaatatgtaaaagagactaccaaaataccgaaagtttcaatgcaggggtaccaatgtcaattatggctggaggattgaatattcagttagagaaaattgatcattataaattaggagatatgaaagaacaacgtactatccaaaaatgcaaaacatccttaaaaataagcaagatagcgacactgatatttatgtttagttttctaattcctgttatcatgattttgaactattttaattggtggataatattatttggtatttaaaagcatcttagagatcatttcatttttaacaataatacctattggaaaatttggcaagagtgatggtttaggggacatttcaaaaaaaatgttcttgttcccttttattggactattaataggacttttaactattcctgtagtattaatttccttttatttatttaatcaatttgtatcagcattcatagtaacaatttttctaatagtcttaacaggcatacatcatactgacgccctcgcagattttgccgatggtattatggtaagaggaaacaaagaaaagaaatacaacgtaatgcatgacccaagaattggatcagcaggaactgtcgcgatttcaggatatgttattggaatggtaatatcaatctcttcaatcacaagtttagataggttaatgattgcaataattctctccgaaatcatgtcaaaatattctatggtactggagtctcattattgtgagtcagcttgggatggatatagttcattgtttacaaaaaatatgaaatcaaaaaagaaaatggcaattgcaacaatcattactatagttttgatagctttgatagctttgatttcagacatgagtgtgattggattgcagatatttattgtaggaattatttgttgttttattgtcatttatatttcaaaaaggaactttggaggaattacaggagatgtaatgggagcaacaaacgaaatagtaagactttgttcactcctatccctgtcataaaagttcaatcttgtttttgtaatgagcaaattacaggcaggttgaaaaaataaaagaatgaacctttaaccaatatttatcttattaaatttgatgtagtaaagacatgtagataggtgatattcaaatcaactaccgtctatcgaatctggattggcatgaagtggtaattttgctaaaccaaaaatgaaataagttaatttattgattgattgattgatggattcatggacatttacattagcaatttgaacagatagcaagataataagaatcataaaattcacccggaaatcaattaaagaatgtcataattaaggagcaaattttattagttgttaaattaacaaaatcaaattgacaaaaagagagaaatgatcagttgtgttctaatgtgtggaggaaaaggaagtagactgaatacaaatccaacagtcaaagtagaaaaacccctcttagaattgaggaataaatcattgatagaatacatgatagaggcggtacagaattcaaaaaagaattttaagatatatgctgcagtgagtaagaatgcagtaaaaaccaaagagttcctaacaaacagatactgtaatgatataacactgatagagacaactggtagcggattttcaaatgattacctaattgtactccaattcttcaaaaatacagaaaacaaatggggaaatagaattcaagattttgcgtataataaaattttgtttttacctactgatcttcccctgatatcatctaaaaccatagacgaaatttcagatttgtatcagagtagtcctagtattgcaatagttgtagacaagaaaatgtttattcagaacaatttcgttccctcaactttcataacagaaattagtaaagttgattattgttatacggggatttcgatattagactttcacactattgccgcattggagcatatagaccaaatcaaagaagtaccagtgatcatgagtaatctggaattagtttataatattaacacggttgacgacttgaaaaaaacagaaaaatttattggattgtaggatgtgaagccaaaatcaagaaatgattaatccaaggtttctaggatattgccaagtattttagcctggccaccggtatttaccaaaagttcagcattacaagatggacatgaaataggttttgtaccgaaagtatacaagactttgatatttttgcatgaatcacattcaacttttacaaagtgactacgaggttttgggatcataatgttatgttttttcacaatcattcactccaactaagcctggatctccaatttcctaattcgcattccttgtttcatcgtctttctttgacaagttttgcaagtatatttcagggttacctttttagtagttttagcggtcctttttaattcagggaatttttgaccaccatacccctttttatcttctgcgtggcgcctggcaccttgagcaccctttctatctttaccttttttataagtagaaacagcttgagtagtatgagttttacatttcggacaaaatttgcgcagctctttctgcatcttcatatataaaatcagttcgagagggtaatttaaagtaaatatacatagtccactagaatccacgatttcgtaagaatctggtaatattatatcgatttacaaaaatataatatcatagtaatcgattgttttttattcaataatgtcttatgtagaataaaaaataaggcaatacaaaccttatatatatccatgatctataaccctcaatgttgcagttcttacaaatagtgataaaccctgaagcttttggagtttgggtaccgttagcagtcggtttagggattggtctaatttatgcactagcatcgatggccagaagggcaagataagcccattaatttttttagactagaatatttttttcatattcatataacaatcgagagataactatttgggattctaatcccatgtctgatacggataactttttgtcaaaataggattcaatgttttttgagaaatgtccctttgggaagcctccaataacaacacatccatttgtatatgatgccagaccggcacctatcgattcaaggctctcataggtacctgttattgaaaaacccaatactatttcaggtttaacaaacacctttaataaatctccaaaattagtattaggtcgaagatccaataataactgcccttcttctgaaattattttcttatctctaaagagatttaacatcagaccctcaaatcgaaaataagacttgggaaacctaacattattccctaccaaaataacgttattatcaactgtatgaataaacaccctaagatagtttcgtttgtatagaggcgtggctaatgcattgagcaaagcaatgtgaaggatatctggtctccccctcttatagtcctcatctagtttagcagacatcatagcgaaatggtgaagagatctatctaacaagatttctttgggctttttcccactattacgaatttttttaagagatggatgcttgaaaacattgataggtataatttcaagagaagtatctgctatgatcaaatttaacaaatgatactgatttaaagggaaataattattatttaaagatatataatgcaaacagcaagtcaatcacaaaaaggtatgtcatgaagaagagcgttataaaacaaatagcaatgcaaagagtaaaggttttgattgatagagcactatattctagagatgaattctctgaccaccatattgtgattgctaaaaaaattatcttaaagtataaactaaaaataccttttgaatacaagcttcttttttgtaagcaatgtaaaaaatttatcatcccaggtagggattcaatcattaggataggtagatcgaatacaaaggctttaaggataacctgcaaattatgtggtcacacgtatagaaaaattattgaaaaacccaatcaaatctgatattttgttcagttgggcatacagatgacaagataaagaataaggattataagggaaaattaatgaaagaaatttgtaatattaaatggcaaaggtttttgatgttccagcagatgacttgatatcaaaattatcagatcaacttaaaaaagataagaaaataaatcccccagaatgggccagttatgtaaaaaccggcactcatgcagaaaaaattccgcaaaacagagactggtggtatactagatgtgcatctttagtaagaaaggtgtatttacatggcccaataggaatttcggatttaaaaagttattatggaggaagaaaaagaattggctataatttagatcaccataaagatgctggtggcgcaatcattagaaatgccttacaacaattagaggcatcaggatatgtagaaaaaaagagcaaaggtagatcaatatcaagcgaaggtatgaaaagagttgacagactagccactgaaatttttaaagagatatctaaacttaataaagatttagaaagatacgcatagaggatctagcatgtctggccccccacaatctcatcagccttctgacgatgaaattagaaggcagcaggctgaagctgaggcaatgaagcaaaaagccctaggtatgttattagatgttgaggcaaggcaaagactcatgaatgtaaagatggtcaagccagagcttgcttcagctgttgaaaattatctattaaatgcagctactactggaagattaaacagagcaataacagacgatgaattaaaacaaattctttctacaattcaacaaccaaaaagggattttaaaatcaatagaagataagataagatttgacataaattataagttttttgtttaggtattaaaggttattatttagtaacctatgattttgagttaactatattaaggttttaaaatatcttctccccatgaaggcagctgtatttagagaatataacaaagatcctactaaagtagtaaaaattgaagacatcgacgtaccaaaaataaaagcaaacgaagttttgataaaagttgagtcggcatcatataattataacgatttatgggcaatctggggagatccggttaaaacaccacttccacatatttctggaagtgatgtggcaggaacagtagttgagataggagaagatacaacaaagttcaaggttggcgacagagttgtatctcattctaatatgagttgtagaatatgtgagcaatgtacagcaggaagagagtatgattgtaaagagagaaccatatggggattccaaaccggtccgctgtggggaggtttcgctcaatatacacatctaccggaagtaaatgtagcaaaactaccagaaaatgtatcatttgaggatgctgctgccatttcaatggtgggaatgacagcatggcacatgcttgttggacgggcaagaataattccaggtcaaacggcattgataatgggtggaacaagtggtgtaggcatggcaggcatacaaatcgcaaagttgtacaattgcaatgtcattgccacagcaggaaaccaacagaaaatggataaatgtctggaacttggcgcagacaacgttgtgaaccatagggaggctgattggtataaaaaagtaagagaaattaccaagaaggaaggtgtggatgtggtgtttgagcacattggaaaaaacgttttcccccaagaagttggcttgttaaaaatgggaggcacactcgttgctacaggagctacaacaggttatgattctaccttagatttgagatacttattcttcaaaggtaccaacttgcttggttccactcaagggacaaaagcagaattagagcaggtcatttattggttaagcaaaaataaaataaagccacttattgccactacattacctttctcaaatatggtggaaggtcacgtaatgatggcaggggccgaacaaataggaaagatcttaaccactcctcaaaaactttaatttttttatatccagctgtaaatacaagtatattgtgggaagatcaagaagtctaatttttattcctggaaacaatcagagatttttagaaaagtctataacaataaattcggacataatctgttatgatttagaagattctgtacctcgagaagataaagaaattgcacgagaaagtgtaagaagagcaattcaagagataaataagattgatgatgctaacaaggagcgaatcctggcggtaagaatcaattccccaacatccgatcagatgattacagatttgaaaaagataatcaccccagggattgatgcaattgtaattccaaaggtcgatgatgacagacaaatagcagaaatttcaagaataattgaaaaagaagagagtgcaaaaaacattcaaagagggatcattaaaataattccatctattgaatctgcgttgggagtagttaatgcgtacaatataggtaaatcagatccgagaattactactttggtatttggcatttttgatttcttacacgacatgaaaattgataatcaggatatggagaccattgctggtttcatgtatggtcgagcaaaagttcctgtagatgctagagctgcaggtattgactctattgattccatctggcaagacattcatgatcataccggtttgataaaagatcttgccctaggtaaaaaaatgggttataatggaaaatgtattattcatccatcccaaattgagcatgtacacaacgcatttaatacttcaaaccaggacatcgaatgggcaaaaaaagtagtacaagccttagacagcgcgaaaaacactaatgcaggtgcagtaaagttagaagggaagatgatagacgcggtccattacaaacaggccagaagaattttagactcaatgtaagagaaaataaattatcaggagcaacacttgatggatttcaacaatcttcaaattatattttcgtttattacaaagtgtgtttaccggaattacagaatatttaggtgaaatcgaaaacattaaaaaaaacaaaagtaaaaagactaagaagagcgatattaaagcgaatcaccacaccgaaattaccctagttttaccagaaccaaaagatatcaaaattggagatagtgtatcaataaatggagtttgtctaactgtttcaaagttaaaccattccaaagccacttttcaggtcattgatgaaaccatcaatagaactaattttattgatttaaagataggagacaaagtaaatgttgaaaggagtctaagccttggaggtaaactggaaggtcactttgtgctagggcacatcgatggcattggcataatcaaaaaattagagagagggaacctgggaagtagaattaagatagaaatattaaataaagatttattgcctcttattgctcaaaagggctctatagcaatagacggaataagtctcactgtcgtaaccgttagaaagagtatcgttgaaatagcactgattcctcatactttggagaacacaacactgggaatcaagaaggaaggcgatgcggttaacattgaagtagacatactatcaagatatatatcaaatatctaccaattttctggtaataacaagaaaaatagtaatatatattaacattaaagtataaaaaaatataattgacaaggatatctgaagccataacttcgttaaagaatggaaatttcgttttaattcatgatgatgatggtcgtgaagacgaggttgacatggtcgtatcttctaataatatatctccgaaacacattgctacaatgagaaaggatgctggagggttgatctgcacggcaatatcaaaggagatagccacaaaattggggttgccatttatttacgatgtactaaatatttttggacccacgaatcaaaccatttcttctattaatagtaacagctcaccgtatggtgacagaccatctttttccgttacgctaaaccacattaacacttacactggaataactgatcgtgacagagctttaaccatttcatcactagcaaatatttgtaatgatttgagtgattatcagaaagatcagaaagaaacgattgaaaagtttcgtagcaactttagaacaccgggacacgtacctattctaatttcttcgaaagggttactcaatgaaagaaaaggacacacagagatgtcaatctttcttactaaaattgctgatatgacgaacgtcacaactatttgtgagatgttagatccccacagttacaacgccttatcgtataaggatgcagtcgaatatgcaaaggaaaacaatctagtaatcatcgaggcaaaagatttgataacctatgcggaatcattcgaaaaacagagatgaaaataagaattgggattgttgtttcagaatttaataatgaaataacctttgctatgctgagtgaggccaagaaatatgcaaaggaattttcatcaaaaataacctacgtttgttttgttcccggtgtatttgatatgcctattgtagtacaagcaattctaaaaaaaaaggatgttgatgcagtagtgaccctgggggcaataataaaaggtgataccagtcatgacagagtaatagctaacagcacagccaagttactttgcgaactttctttaaaatatgataaacccatatccttagggatcaccggaccagatatgacatttgagcaggccgaagcaagaataattcccacatctcatcatgcagtttataccgcgatcgagatgggaaagagactaagaaaaataagaaataataaaatgaaaagtaacgatatacaaatagtagattaggttggtttgtcaaataacagtaataaaattagagggttatggtgcatggactctaaccctaggtagtgacagggaatatgctttacaaattctgcagtcaaaaatgtatgcagatcttcaagaatgtttttctgctaaaaacggattagtattttctaaccgatttgatgagtttattgcagttacaaatgaaattagcttacctgatcataaagaaatccatgacagggtttcaaaaaaaaatgaaaacataaagatatcaatgacgatagggactggaaaaactccactagaagctgacaaggcaatacatgagataaaaagagatgcaaaaaacatgatctgtccaaatatttacggtatacgagaaaatttcaaggtacaagagggccaacaaactattgaattagaaaatcaaagaggccataacaacttaaaaatattacacatagacatcaatggctctacctcgatagctaaaaatctttcaacctacgaaatcacaaatttaataatgagactttatttggcaatatcagattcattcctcaaggaagaaagtttgactttctttttgggaggagataattttatgattgttgcaaaaaatgatattcaaataaaaagaatagcagaaatagttaattttttaataaattcaactggaatcaagctgaattgcggtataggaaatggcattaacgcaagaaaagctgcagaggaagcaaccaaatcacttgattcaataagaacctacagaagaagcggaaaaataattaatgtttttgaatcgaattgaaaaaatcattaataaaaaatgcgtacattttgtttggtaaggaacttcaaatagttcagaatggaactatactaattaatgaagatggaacgattgaagatgtattcacatccaaaaaaaatacagaaaaaaaaggcgatgtaataaacaattcagtcaataatgataataaaatagacattattgatgcagaaggttttattctcctcccaggattaataaattctcatgttcatataggagacgccataggaaaagacgtctcagctagttcggatttaaatcaaagaatacatccacagtatggtattaagaagacaatactcgaaaaaactccaagttctcagttaatgcaaatgattagaaatgcagcaatgtcaatgctacataagggaataactacctttgtggatttcagggaaggaggactagaaggaataaccctcatacaaaatgctttagaaaatatagctataaagaagatgatactgggaagaattgattttaatgcgaattatgaggaaacgggtactaccactagatttcttgaaaatggtaaagatatcgggtcaaatggtaaaactttaggaaacccgaactggatagaagaaaaccatattattaatcagggtagtaaaatagttgagaattgtgatggctttggcattagtggtgcaaacgaaaatactgatgaaatgttaaggctgtataataaaataattatgaaatatgaagaaggtcaaggtcagggtaaaactgaattgaaaagtcataggaagaatccagtggtagcaatacatgctgcggaggccgaaacaacagtaatggaatctgtaaaaaagtacaaaaagactgaaattgaaagaaccgttaatacgttaaaccctgacatatatattcatgttaccaatccatcgaactcagacctgcaattattatatcagaacaaaaagaaaatagtcatttgcccgagagccaatggagtgcttggaacaggttttgtaccattacgaaaaatgttagaatataattttgaattaggtatcggaacagataatgttatgcttaattctccggacatgtttagagaaatggattttctcataaagagtcaaagagctgttgaaaggaatactagatttctagatgcaaggaaggtgctaaaaatggctacaataaatggcggtaaaatttttaacttaaatatcggaagtattgaaaagggatttcaggcagatttgctttttattgataaatacgatttagatctatatccgattcatgatccccacatgtctatagtacacagatgcactgagagacaactaaaagcagttatgattgatggtaattttgtattggaaaaaacatcaataagataaaggtatcagcgacgaatgaaaataatactaaatgcggctattagtattgatggaaaaatcgcgaccgttaatggcgacacaaaaatttcatcggcattagatctcaaacgtgttcacggattaagaagagaaacagatgtaattttggtgggtatttctacagttataaacgacgatccattattgacgatacgatatggtatgaataaaaaaggtactaaaaatcctattcgaataataatagacagcaaagctagaatccccattcattccaaaattgtaaaaacagcaaatcaaattgaaaccagagtagtggtaacctcaaaagctccatctaagaatttgaaaaaattggaggaaagaggtatcaaaatagttgtgctagaccaaggaacagaagaggatagagaagatagaggagaagacaatggagaaaaggtgaatttgaaaaaattatttgatcaattagaaaaggagggtgtatcaaatgtcttagtggagggtggaggagaaataaattggtccgtcataaaaaataacttgtttgatgagataataatcactatatctccgctcataattggtgggaaaaaggcgatatcattagtgggtggagaaggctacaagacaattaaagaaagtgtaaaaataaagttgtcacgaatacaaaaaaaaaataatggtgaaataatactacattataaaaatatcaaaataaaataagaaattgttattttacggtatttgaactaagttgttctattttataccttaatgcatctttcaatttactgttatctaccatattcaatggttctttacaattaggacacttaaagaatagttcaattgcataatcaaattttattctatcacaagcagaattaccgcaatgataaaattcggatgattcttcatattcaagtctattttgcaatctttccaatattttcttcttctgattgtcaataaaattatctacattatctctctttgctctccatctatacacaaaccatccctttttctcatctttaacgcgaatacccgttatcagagcctttccaaaaagatcatatagaacttttcgaataatatttattcgaagacctgttgcaacagcaatttcttcgtcggttgaatcttcagtctttaacagtgctttggcaacatgatgatattcatcccctcctattagagatgcaatttttacaaaaggatcttcactactgtcaacacttcgcataaagatatactataatagcgtgattaaatgatatatagttttcccaataattgcgagaaattcagggttttctccccatataatgcctttatttttaatcgagtttttatgtgccaagcctggtatgatattttatccattttcactaaattatattaatgacaatacataaaatctgcaataaattactaaaaaaaatttactgacgattgtgtgaaaaacattaatttcggcccggcaccataatagattgccttccttatcaaaatcaaaatgtaattagattttttaacataaaaatatggtcatgacaattcttaatttaacattttttcatctatcatgagatggtttcatttagaatttagttcctccaaaaactggtaaattaccgagtagtctttattttttctatcatcactattgttagctgccctaaaaagctgctgtgataaggaggtcatgggtagaaacagccgcaaatcttgtgatgcatccatcattagatctatatcttttaacatgttttttaggaaaaaagaaggcgaataatcattatttatcatcatttgacctttcctttcactaattccagttttaagcttagtaagattaagaatttgtaaatagagatttggatctattccactatgtttggctaaaattaatccctcagacaaggataaggtaattatggctatatttagattgagtgccaattttatggaattagaaaccccattgatttggccaacataaaacacgtgtttggaaattttttccaaaacatgacggatttctttaaatgaggtttcatttcctgaaacaagagaaataagttccccctttttcgcgtcattgggtccacccatcaccggggtgctcatgaacgtaaatccatcccgttcccttacaagatttgaacagtacaaagattgatcagaattgacggttgtacaatctgcaatgattagttccttgttactacatttcatcacaccattcttctgaaacagaatttccttcaatgattcaaaattagtaacacatgttattattaaatcgctttgttcagccaaggttcgggcatcgctaaatatttttgcacccttatcctgaaaataagtgagtttggctttgttcctaccgtaaacatttactttagtacctagttctattaatcgttctataatcccagtacctaacatgccaaccccaattacaccaatcgccatatcgctctttagtgacacaatctttgagcatattagaacagttttaagtgtatatgtaatttctaaatgagaagaataaaatagatacgtaatggatcacacatataacatgacttttacattattgattggtaataactttatatcaaatagtccaagaatcataaggtataacgaaaaatctttattcaaattagaacaaatatcagattcacaaaatccttttatttcggtcaatatagtcgatcccgacaataagttagtaattgaagtcgtagagaacgtatgcaaatattgttccccagatctgaaaataaaaaaatcagatcttgatcatgttttgattgttgataaagctggtgaaatagtatttgaatccagaatcctagataaaaaaacaattctggtcagcggaattttttacgttgatgatctaaaactcacaattacgcaaaactacattattcttccgacccaaaagtggataatgcatgataaggtagatgcaaataataaagatataaacattacaaatgaaggcataagagtgtcttcctgataatattaataataaagtctacaaacatgacgaaaataagaatggatcattagctatccgcgtttctctttagctacaatccaattgcctgattttcttttaaggatcaatgtcccaacaaattttccactgctataaactttgcaaaattcttggctcattccaaaaaatgcttcaaggatgttatgttttttatgatatccagcctcaattactttgatatttaattttgtacttgatttttttatgacgtttctggctatgctccaatcaccgctccattccaccaaatcaaaatctccaaaatttaaggtatgtatttgattatttgtaatagaaattttgaaagatttgttgctctttatgataaattcatttatccattttatcgctacatcgccttttcccttttctattccaaaattattcgcactagccaaaaaatatcaagttatagtagcatggttctctataaatatataaaaaatacaaaagtaaatgaaaataccaggcaagcttgcttacgacgtcttgatagtttttcaatggaactattttcagtgtattaaaggaaaagatgtctgaaccaatgtagagttgttctatatcatgagcactgtttgcttcaaccataataatccactcatgtttaagcacagacatatagaatccactgatattttttaccccatatttttcagagtttgactgcaatttattaaagatctctttaaaaacctctttttggtattatttaatggacaagcttctggactatggatagcaaatatcccgaaaagattgtaagaactcttaattcttagaaaagttactctcatttgtataaattaaaatggtaatttgacaatgttgaatgtatattttattctcactgtttacaccctaaatttttgactggtaaagcacaactagaatgcttatatcaataattactaactatggttatgaatgaagacagcctcataaaacacaatcatctaaacgagggtataaaaaatgattgctctagatattttttgggaggattgatatataccataggtattacaggaaaagaaactgatcaaaattattcggtcttagaactactatttccagcaggggtcgagcagaatgtacctcctcacaaacatagtaatgaaaatattgtattttatgtggtcaaaggaaattttcttttcgagtatggagacaaaagtattaaagcggatccgggaatgtttttgaatttaaagagtaatatttttcactcatataataaaattggggtagaggaaggtaaattaattatgattatttctccggcaggatttgaaaattatttcaaagaagtagggatgcctattaaaaatgactataataccaatatccccaacatcaaaaccgatgatgatagaataacacttcatataggagaaacaaagtatggtctaaaatttgtaggcgaatagtaattccatttagacataattaccaaatattttcagcaggattccaattaaataagctagaacgtttaagaaaattaaaactattacaaacagtaattatgataaacactatgataaagaggaccagaccaatcaagtcatatcataattaggcaaaaatccacagataatagataaatagtccatcaattaaggtatttaagaaaggcattaacgtaaaataaattggcaaacgaatcaagttataaaaaaacattaaagtatctaataattttgatggtttcgagcattatatttgtcgatttatccatagtactaatccctgatgaacattttcagcatgcaattgcaataattagtcttaatattgcaggtgctactgccacgggtttgggcgtaatagcggttgtaagacatggaatttctggaagccatggaaaatcttatttgtttttaacaattggtattgcattgtggtttgcagcagacttgggaataatgtactcttattttgtcttacatgtggatgaatttaagcgaataactctattagatatgctatggttgggcgggtatctgtttcttatttttcatttggtatccattattagaacaataaagattagaaacttgtctgtaactctgacaattatttctgcagttgttatagggtttgttatagtcaattttgttagcttcctacctttaccagaatcgttcttaaataattgggagattgatgctgctgaaaaaggttatggatggtcagatcttgtagttactttactatatccaattttagatttatgtttaattattccctcgataaccatattgttgaatatatatagagagtaccaacactcggtaccttgggtactagcttcgttatcgttattagtaaatgctatagccgataatggttatacaaatgattacatcaacggttcagcatcggctttaccgtgggatttattttacatcgctgatttcataatcatgtctggtgccctattttggtataacaaatatcatattaccgactacatttcaaaaaagaataaaagaaacgaattcgtcaattaggccagttaccctttgtctttgcatttgcctccatctactaaagaatggataattatcagtcagttagccattatcgggctgtgggtcactgttttcctcctcggattcatcttcatcttcatcttcatcttcaaaatctatatccttttcctcttcctcctcttcctcctcttcctctatatcgctctcatcgtcttgtagttcatgggtctcatctttgatttcatccctttcggcatcttgattactcatattgtcgaaacctactatacacaaatggtataaaaattttgaattacttatcgattaatatatgtagattattgtattggctatttacacaatttttcaggtatacttatagagcaagtattatttgaaattgaattaccgatttcgttaaattttcctccatttcctatgtttatgtctacaccaaaactccttgtaaaatgattagaattcaaagaagtagctgtacttttagtatcaacaaatattccatttaagctgctggatataagattatcatttattatattatcatgagaaccaaataaagaaatagaagaaatatcattagaatcaaatgtgttatttgaaatcatagaatcaccatttgtgaagaatttaatcccggcagtgttagtatagaatcgattattgtctatgagaattcctgaagaatttgcagcataaatggaaatttcattccctgtgaagttaactttagatataacaacatttttggagttatttatgtagacgccaatttgaaaatgaccaactattccatttcccgttagagtaacattttctttatctgatatcaaaatgccggtataagggttcaaataacctgaacccaaaatagaaaagttatttaaattaataacagtattattggtatttattgatataccattctcaaaatcgcaatccaaggacttgtttagcgtataaaactcgccaacatacgaatcacacttaaatagactcgcatctggattcatattttgaccactagcaagtttaggttcaacttcaacttcaacttcaacataccatagaacaaaaaatagtgcaaaaataactgcaaaagtgtgaagaatacaattccttagcgtgaacacacaattaattgaaaggtctgttttatttatttagtgtttagcatcacacgactcacgactctaagtaaaagtactgtgaggaccgcgacactaaggttagctaatctttagtaataataagatgctagtcaaaaaaagtacagacacgaaatatctaaaactaaaagaagaccttcataaaatataagggccgttgattttgagccaccttattttgattttataatcactcatattatctgatactattttccagaatcgcttagaatgatttctttcaatgagatgacttagttcatgtaataccacatactcaattacatccattggagcctttaaaagatggatattaagatttatgatattacgatatgttgcactgccccacctacttttcaatttttttagcaatatttttgtaggtgacacatttagaagttttgaatactttgctattattggactaataatcggataagccatgttagctaaccattgttcataaatgcgttttacgtttcttctattggcgtaaataataaatccattattagaaaaactcaatagattcgaattatgaccaataatccttaatccatagttctttccaagatatggtaaagtagaattattttgataaaggggtactttaattgatgcatctggattatcttgttctttgattttttgaaatatccactttgcctttttacttacgagtgactcgatttctttcaaggatgatgatgttgaagttcgtactgacacattgccatattcaatcaaaatttcgtaagtttttcttcttctttgtgtccgaattatttgaaattctaaaacattgttgtcataaataattttatgtttgtggttgaaagaagatggcacactcataaatattggctaataataattagaagactgtttttataaatttaaggatgtatataaagtgtcgatatcaatccattacagggcaaaaaatatgtttttctttattgtttatctatccagagtttcctaaatgtcctagaatggtcaaaattttattaaaatattaataataacgtcaaaggaaatccattatggatttttgaggatttcttccatccttatctatttttagcaggttggacactttaatgccaagttttcttatgtacatggaatttacatcatagctattggcagtatgaatatccccttcgccaatctcttcggtgttgctgtcatcatcattaagactgaatcgattcaataatgtccccataacagatattagactttctttagtcttttgataagatgaaaaggtaatttctctggtttcaattgaaaaatcagtcctaactaacttgattccaacagttttaaacttgtatccttttctcctgacacgttcataaatatcatcagccatatcattaacaagaatattcaggatatcttttctattaattagaggtcttaacaatgtctcctcggtacttaaggacaggttgttttcgcgcggtataacaggttcattttctttgccatttgctatctgccacatccacagtgcttgttttttcccaaattgatcagacagtttttggatattcgaatcggataaatgtcctatagtctcaatccccatgtctttaagtgtacgtgtagtttttattccaattccagatattctatctactgccagtgcggacaaaaatgttatagtgtcttgaggataaacgatagtaagcccatctggtttttgaaaatcagatgcaatcttggcaaccgacttgtttgacgcaactccaattgaacaaattagtccattacactgtgacctgatagaatctttaatatttaatgcaaattccaggattgaaaaaccctcctggatgtcatattttcttgtggaatgattaggggtatttttcaattttttctgatcgacaggattatctcctgaaatattctgtttttgatactgcgaaatttttttagtgcaatcaatgtatgcctcatcgatactagtttgttctaatgcatcggcatattcctccaatagtctcattacctgctgagagatcgaattgtaatattctttgtctacaggttttagtataaggctaggacacaactccttggcttttgataaagacattgcagacctaacgccaaattttcgagctgcgtatgaacaagaagcgacggcgcctcttgttatcaagctgccttctctttcaggagtcattattactgcatgggccttacctttaagagaagagtctctcagttcttcacaggctggaaaaaaagcattcatgtcaatgtgcatgataatttttcccgaccagatttgagtagcaagagaaggctttttggaatcttctgatgaattaacacttttaggtttaggaattatcaaattttgaataagatgaaccatggacgggttccggagtacaataattgaataatcaataacattattggtatattttggataacctgtttccttttccttttgctttatcaaattgatccatctcatagctcggtcattattgatagaagcattatcaagattaaggaaaatgaaattagaagtaacggctggatagtaatatcgatatccggaatgtgaccaagcaaaagatgaattatgttttctcaaaatattgtacgttaattcttggtaccatgtattagtgttcccaaaatcaacagccacagaaaaaccgtgataagtagcgttatgcagtatttcctctaaccaggtacgtccagtatttcgtaaggatatttgggggggtggtgacaataaaattacaagaattttttcttttagcacttgtaaatcttccaaaaaccttccaagtgattcaaattggtctgatctcatggtcttattgataagattttgaggaatttttatagagaatcgaaaatcatccgaagtttcattcgcccatttttttagagcaatagagcttggaggaaataagctcttgccgaggtcaagatgcacaaatttgaaaagtttggaataatacgaaagatattgcattgattccaatccagcaggataaaatttcttggcccattctgggctcttccatccactgcaacctatatagtatttcaatttatctttctctttttcttttctgatctaccaagattaatcttactttcttcaaccaggaattctatatttgaagtcccaagagaagttatgaaggatggattgatctcgatgaagttaaagataggaattgaaagaattggtagtagtccttgaagtatgtggggaggtggggaggtggggagcgagaatcaagaaaaagtctgagcaacgaaaaacattgtcaaagttattttgaaataaatctgaccttttgacaaatatcacaaaaaaatgtgacgcgccatgttaattaaaaaaaatggttgttattctggatgataagcatgatactaggatagtattttcctcatctctgtagaacctcaattcaagatattataataataaaattaatagaattatttagtattattatgatatataaataagttatatacaaatctttaaaaatagtaatattatatattattgtttaaaaatatacgggtaaaagtttgcagattaagcatcgtttaaaaacatctgtaatgatattaacggttttactattaactgtaacctcattttctttcttaggatctatggaatatagtgcacatggaaaaaaagattttattcaatctcaagtatctaaacaaaactcaaaatgcgaggcgggagaggataacaacaattcttgcaataacataagcatatccaaacacgataatgatggcagtgggagcgctagcaatggtggcaatggtaatgacggaggaaatcaggttcaagtatctaaacaaaactcaaaatgcgaggcgggagaggataacaacaattcttgcaataacataagcatatccaaacacgataatgatggcagtgggagcgctagcaatggtggcaatggtaatgacggaggaaatcaggttcaagtatctaaacaaaactcaaaatgcgaggcgggagaggataacaacaattcttgcaataattttgatcttaaagaaatgattagcgatagacttaaaatgttaagacaaacttaaaaatgcatttactcttttgatatttttataatatagtatttttgaatcctaattttgataattctcagatctccaaaggtattcgtagccatgagtataaatatcaatgatgtttccaaacggatcttcacacgatactaccttgaaaggttttccattcgttaactcccatatttgagttctctgtttaccaccactattaacaatcctttccgtggtttcctcgatattaggatcagttatgcaaatatgaaagaatccggtcttccaatactcaaaattgtcctcccttttctcttctttaggttcaatgaattcgaaaacttcgaacccaatttgattgccaaagcttaggtgagcaatctttagtttcttaaaattcttgccaaaaacatcttgaaagatcttgcctatgtgagtgtcatctgcaatggcttcgaaaggtggttttacaacattaaaacccaaaacttttgtgtaccacgctattacatcttcaatattagttacacttacagcaatgtggtttaaattactaggatatggatacaattttgatttgttgtcagatattttattggaaggcaaagtcattagtaaagcaaatatttttccctattgtttaaatttgttgctgagattaaaattcatttaaggccagtctaaaaacattcccggtggtaactatatgctcatggattcgaaaacaattattagaactacataaaatttttctgataaattataattgcataatgcattcatacaatccatcgaattggttcgtatttactgtaccatacggccattcgataataaaactagttgatcttttaaatagtccctataatcagtttttttagaaacggtctaaacatcttcgtatccataatactacattcttatctttaggaaatataatactagaatatccataggcattaggatcatcatatatcataaccttaccaagaatatatgaaattttgcatcatcattttagtccttcgtatttagtaataaaagctccaatcatttcattcaacccgaactgattagatttgatggtaaaatattgaaaaagagtattaacaatatgaaaaaaattttagctatcgattatagacgacggtgactcacataagtagccattagaggctatttttctcgtcgttaattagttccgttgatatagttattttaccatccaccttccactttgcaccccctagttctcgaccatcaggaccgtaagcttttgggatctcgatttccaaattatcaaaagagtaagtaacttgcaaatccttgccggtcaatttgtctatgatctttgaaattaattccgaccattctgaaatgtgctctttagatgagttctttgatcggtcagaattgttatttacattctcgtttccactattattagaaagttcgctcatatctattcatatttattaagctttaaatagatatcatcacaatgcgacatttctaatctagtgagattctttttgatagttttaaaattaagggaaaaatagtcttttttcatttttgaagggcattaatctattgaatccggagttcaaatcaacaatcacatcataggaccataatagaatatggaggtggtggatgacataaaggatcagttaaatcaactagccggtactagatgcatctatcatttgttcgcgtgttagtctgaccggtagtactctacccggtttcgattggtatgatggaattccgactccgatagcaatcaatgtttccttttgtttagtatgaggagagaaaaattcgatcacttcattatcataaaaagtggaacctgatgctcccaagccactggcataagataaaagataaatttttcctgcagtgatccctgcttccatctgtactgctctgtaaccccgattacccaacatatcaagtatatgttttagatcagtcattatgaatatcacaacgcttgcgtttgcaaaaagagattgatctaagcaaagatgaccggagatattatgacctggtctatactttaacaagtctatagaattattcctctgattaaaaaaatacccacccttttcaagcccatcaactgaattaactacaagaaataaatcaattagactatctgaatcacttttgtaatccattggaattcctcttgttgaatttaaaagaatattagataaagtcaaaaaggagatgggtagccttgaaaattgtctcgtagaacctctcttcaaaatggtgtttccaatatcagggccgtggtcatccacacaaggcttgggcaaggaatattgtcttaaagtacccgtattagaattatcttttttatctagttcgtcaacttctccaatcctcttgtgattaatccattgggagacctgagcattatcgaataatttagaactgttgtaagctttccaaatttcaggatagtcaatttcttctaaggaaaggggataaacctttggagtaggtgaatttagaatcttttcttgcattgattgctcttggttaacattgtttttcaaagagtctgcatcaatggctgcaatcaatatggaagcctctttatgatcttctagtcccagcaatctgttagattggtcgtccagaaaccccataattaatctggtataaagatgcatagaacttgagacagccagtaggttagaaactataaccccagcgtcccaaaaccaatgtctataagatcgtgattgatacttccatgcatttctccatgcataagatgtaaatattaaggaaacaggagatgttgtaatattcgtattgttaccagcaatagtttctagaaagtttctataatcacctttatgaatagcagtcaaactaaattcacctggattaaaatgatacacccctgcatgcaattcagaaccaagacctttagtaaccacgtaggtttctattggataaagggctcctgttgcagaagcagcacgcatataataatcaacagaattaaaacgcatcacgcgtgttataccacaagaataaaacaacagggaagatagatcagataatgtaataattttagaaacatcctttgaagaggataatggagaagcaaattgggtcctgttattaaatgactcattgtcgcttgataaattactaattgcggtcatagcattcaaggtaggatgaggaaaatctattggaagagggaaggaagataattctttatacaccttaaatggtttaggccgattactccaatccagatagtaatttgaattcataacactaaattcagaatgctttgtcatttcatgatagttaatcgaatacaggatatcattattcatgagttataaagttataacaattatagcatatttaagttagaaatcacatctgataaattcaaaatccgaccagtccattaacatgtttgtttgctctctagagacagcccataaaaaaacacccggaaattaaattctttaaacggaggctcatgcaaaatgatactaatcgtgaatacgcttctctatttcgaatgctaactcatgcgaggggaagtataaatgaaaaagttgatccttgtccatctgtattattctgggcccagattctgccaccgtgggattctataatatattttgaaacatacagtcctaaacctatatgattatcgactgtagagacaaatttgttaaatagttttgagagaacatatttatctattccttttccatcatcctttatttggatcagaatgaaattgtcagtatcgtgtttgtgatcatgtttgtttaaactttcgtaatcatgactttttacttggtttattttgtctaggtaatgcctatctacaactgtaacttgtactgtaactgtaccaatggattgaatgaattccaccgaattattaaacagatttgtcaacacttcataaattcgaattctatctacattggcccttaccgatttcacagaactttcagccacctcgaattgaatattcttattttttagattgtcgtctgtcttagatacgtacctataatcgttcactgcttcagaaactatttcataaatgttggtttcttctttattcaaattgaaagtggtattgtctattttagcaacatttagtatgttaattacgatagagtttaacctattggcgtttcgtatgatagaatcaaaataatgtttgtaatattgacctgactcattgttattaatatctatcgttgccatttccgaatatcctaaaattgcttgtgtaggagttcgtaattcatgagctatggtatcaatcaagtttctttgcattatgtcttgaatgtacagtctctcggctaattctgctctaccccattgcacatcaaacaacaatttgtatttattgatagagtctaattgagtggtgtaaaaataagaataatcacctttctgattatcatcgtttgatggatgttcgtcatttagatggggatttacaataagtagatgataattatctacgatcaggatcaaagattcaagttcaatatcatcgccttttggtaaagccctacacaagaaatgtgactcctcttgttgttccattatgcctaattccaaaattatgtgtttcaaattatttgactttagtattataagagatggaatgataaatttgacttttatcttatttttcaaaaccatattttttaagagcccaaatagatcttttgatatgaaattattgctcccccataaggtagaagtataaaacaagacttcatgttttgatgtacttattaatttttcaacaaattggtttataccattcttgtcaacttcacgtataacagaagccacatcaaattcagtttctagaagatgtattttctttgttgcatctattccaaaatgccataactgttcaaatattaatctatattgttctattatttcgttgtttatattagtaatataattcaagtcactcataatattattcccattatcagttttgggaagaaatacacaggttgactcattaaccataaattttagattcaactcgtcaacatgtcgtatatctgcaactgataatagttcttttatcttgtgttcattagatagactgactcctgttaaaatcttgatttcaatctggttttccttaagatccgataataatttgaagaaagaatcattactgattccaagcaattttgaaaataatgaatagggtccacaaaaaaagatgtatttagaggtaattctacagatgtctaaatatctatttggatctgaagatacgtcattcaattgtttgaatacacccctaaacaaggatatttacgaaaggtaatatgaggtttgatgatattaaataagcatttatttatttgatctgagattcgataggcttcttcattaataacatacttatcttttctacgacagtagttggactgattggttttaccgcaaactcatctgcaccgtaatctaagactctggtcttactgttttcattttcagcaagtgcaaatatctttacatcaagagtcaattttcgtatatttacgattaacatgggacctctatcagcagcaatcgacccatttattaatataatatccaccctgttattcaattccttaagcttatctagacattctgttgcactagcggtcttgtataccttgaatttggccaaagtgaaatgacctgctaaaatattagagacatcagcatcatcttctactaatatgatagaatgtttgttatcttctgtggatccgttttgcaactatacagatatatcacatctcggataaattaatctttccagaattacgaaacttgacacatttgaatggttggtttcttcgtgaattaataggtctatatcttcaaatatttcaaattcaaaaataataaaggttgaacggactactaatcagaatctagatcaattgcaggagctggaacaattaccacgggtttgcctatcgctttgatcaaagtattttgaatttgaaccaggttttgctgtatggcagtttcattgtcgtcatttaatgccaaaatagcgtcattagtgtaatttaataatctttctttcatcagtaaatccgaagaatcggcggcggatgtagaattagtttgatttgtcggtgattgtatttgtagttctgattgattaatgtcggcttggtcgaattggctcacattctgattggtttgattactaatgtcagcagcagcagtatccgttatagtagtattggtattggtggtatttgctaccggttgaccataaccattatagcttgctgtacttaaaatcatcatcaagcttagcgacatgataactggaacaactattttcataaacgattccatcatgctatctagagcaacaatatttatataaatgattggaataacaactacaactaatcaaaattaactaatattatttccaataacgttactgttttaggttaatcagtaaaagattcttaatggttggagtcaaacgtatgacgatatgactgagactattgacttgattaacctgggatatctgtatagaataattaagtgaggcttatgaaagggatattgattactgctaattcaaaccggatgctacagtctgataactgatttgtgctgtatatggacaagaaaggataatggattattgaatcgtaaagtcacaagattaaaagaacaactcatctcgaataaccgttattttaataatttcagaaattaagaataaaaagcatatccgtgtgttggattaatatttttgttaaatgaaaagtcgtaattaaaaatagttagagttctagattacgagagaggatagaaagctctcattgtgtgctgtttgcagatgataaagcattggtttgattttcaggctctacatactgttcctgttccattccctgtcctagtgaggtattaccgcctgccaagtctgtattattagctaagatttcttgatttccagatgttaaattctgtaattcttgaattgatcctacatctgatgatgtttcgttacctgaaccggtgcttgaagcattacctgatgatgatgtttcgttacctgaaccggtgcttgaagcattacctgatgatgatgtttcgttacctgaaccggtgcttgaagcattacctgatgatgatgtttcgttacctgaaccggtgcttgaagcattacctgatgatgatgtttcgttacctgaaccggtgcttgaagcattacctgatgatgatgtttcgttacctcccatcatcccggaagtcaaattactaaaggcttgaccaatttcctccacgatattttgtgcatgtgccacctgaactagcggtataaacaatacagaaagtagcaataatgatagatatttcattaatgattttagttcaccatgatttaaatagttgtacccatttataaaattcgaaaatatcgataatatagcatatattttaatctatcgaagccgatatgcttttgctattaataataattctgaaaatcctatggagtcaatcaaactacaatatgacaaaatttccgacaacaaagtaaattgaggttaattgtcaagactgactaaaactaaataaaacatgcaattttagtcggaaacattcttttgagcaataattttgctgggttttattttaataatggattcaccttctacagcgtttctcttaccatatgtttctgcattctctattcccatgtatcgctcagctatgcggctggttagacttaaaagttcgttggagttgggatgcggatctatttctgcgactccattgattatgacaaatgaaaaaggaggtttttgatcatctacacagagacatattttaggattagatatcaagtgtcttgccttcactgaattgtaaaaagttgtaaaaataattgtaaaatccttattattgctactacttggatcataatcaataacaaaccaaactggagcaacgtgaggggtcccatctaaagttgctgtagaaactttagcagtcatcgtcccaagatttaggaagctcataacttcttctcgattcatttctgtcaaatctcttcattagcaatattagagttctcatttaaaaacttgaattctactttggttgaaataaaaaccactaaataattcacaaagatttcaattagaaaaacaggtagattgtaaatttttgataatttcctaaatccctaaatttgtctcccagtcgaacgatatagagtacacaatagtcaatacgttatttatttttataattgtacagtatcatcatatctaattatttacaatagtaacaatatgataaataatattgaaatcaatttccataacaaattaagagcaaataaacacatagaagtaatacagaaatgagtatcaaaactataatatatcaaaattcaggtatagatttagataataatgagtaacataacaaaaaactataaggttggactttttacaatgtttatcgcagccgctttaattggctcagtagtagcatttggcgacaactatgcatatgcaggtggaaagaagaaatctaatgacgcagagcaagaaatcgaacaaagccaatcaaatgaacaaaatgcacaatgcgtatctggtgaattcactttagcatcatgcaacaatataggtttattattccagaataacgaaggcaacttagccttaggccaacaataaacttcctcctctttttttactattactctaactaatttaaacatcttataaattaatttgatctagataaattagctcatcttagtttttcccgattatcaattttagaaacagaaaaaaattttaaaaaaataacacttgtttggttggttcatgccaaatttgatctatcacgactttgttgaaataaaaataaaagacttcatgataaaaaaggaaattttcttagaaatttaatttgaatctcaatcaccgaaactaacagcccaactagtaattggatcagtaattcaaatttctgtctataaactaagttgagagtcttgactccaagtcttcaattttctttcttatttccttcatctcatataatatttcgttttgggtaaccggattagccaattccatttccaaatttttgtatgcttcctcagattttcttactattacagccacaaaaatattaataacaataaacgttcctattactatgaaactaataaagtaaatcccgtatagtggatttacatgagtgactgcagacataacttctatccacccctccagagttaatatttcgaataaggttaagagtgatttagccaaggaaccccagtgaattgggtctatgtcactgaataaataatacccagcaataccatacatgaaaaagagtagagacaagagcagagagatatttatcatgctagggattgatttgataattgtcatgatcacagcagacatctctttagatctgtgagtcagtcttgttactcgcaaaagtctaactagacgagcgacggttgtgtatccttcactaaggggcagcagagagattacaattattgaaaaatccataatattccaaccattcttgaaataggttgagaagtgagggtaagaggcagtaatctttaaggcagcttcgactatgtaaacaaccaaaaccatggcactaataatatcaaatatagggtaatattcagccaactctggaatagtttctaataccaaaactgcagcttgcaataatattacaaaagttataaaattattaaaggcaggatattcaattatttttcttatcgtagttagcatactatgtcaagttcagctagagaatatttttaattttggatctgtggtgatagcagactataatcaatatgaatatcactattacttttatcttactatcgacagatgctcgaggtacataatatgtatatcatcataatattgatactcaacttctatctaacccgatactcattcatcttaggcaattgtgactctataatgatcaataggtgtaaaaaataaagcattgtgaaaaattcgcatataattcattttcgatgacaagatttttgaatgaattactattacaaaattttagatgagaactaatcaagcatgttaatttttttcacaccaacatccgatacaatataaaaatcttcagaaatctgtatgatgtcacccatatttatcttggaatgatgtcgtttgcattttaaagaaatcccaaaaggatttgcctcttcgacgaactttatccaaactctccccgggctcaatatattcttaaattctgcttcccataccaattcataaatcgtagagagtgcttgtcgactcaatttacttgagccaagcatgatttcaggattagtttctttataaaaataaactctaactatcattaaagataactatgtactttttattaactattgaggtttattattgctatgatttgggacggattcctattgaaatataaagaaaatgaggtatccctagggatacctacttcaattaattatctgtttgtctttttttatcgcatttatatatccgatgactaaaagaaaaagaaatcaaccattagaccttgaagtaactattcatcataattcataaatatgttaaagttgtaataatgccaagttctctcatgggtgcttttttagcaaacatggttagagccccttaagggctccaaatgtatatctatcttaattctatagcagcacgatgattgattgaaaatatttataacgtttatcacaaaggaaaaaaatccaatgaaaaaatcgagtattagttaaatggggaattttctatcaatactatgatctggttagcaaaaaattcttaagaataacttttataatgaactcaacaaattcaaccttatttattatagaataaatggaagctgtagagtcaaggttatctatggaaatcaagaaataatctatttattgtgtttctctttatggaaattaaatttaaaaacttttatagaaattacatctaaattcattattgtctgacagtacaaaaaacacttcctctaattacaatcaatgccgtcgccttctgattgtagatgatgaaaaggatttgttatttgtatacgaaaaagctctaaaattagtaggtatggaaatctctacatttgacaacccagacatggcatttaaggaatttaaaaagaatccggaaatgtatagattgttattaacagacatgcgcatgccgagcatgaatggatatgaattaataaataaggtaaaagctatcaggcccgaaataaggactatcttaatatctgcttacgatatcacacaagatgaaattacacgaaatctaaaccctaatataagaatagatggattgatttgcaagcccattgcattggaacgtttaagagaaatcatcattgatgtcttaaaatgaatatttgatgagccctcatatgtcctctaaccgttaattttaaggctagacatatcaaatccaactaacggatcggaaaggaacttgaccttgagagaaaacagaagcagtggagataactcgtatactatttaaaattgatgacatacagactgaaaagaaatgtgtaattaataaatacaatccaagtaagaaaaagaagtttatccttgtgctaatgcgttacttcctgtattttcttgactttggacgttgatgttgttaccagaacctattgtatctgcacctgatactacttggctgttttggctggaggattgagattggctgatgctttgttctgcagagtttccaccctgtccaccttgtgctaatgcgttgtttccactgttcttttggtgttggaaactaaggttgttgcatgatagaaaggttgttccacctgatacacatccagcattttggtttgacgattgtgattggtctatggactgttttgctttatttttcttgttgtgtgtggctaaagcatcatctacattgagtattggactgacaaatagggttaatgctaccactattgcaattgatgcgacaaagattttgctgtttttgtttttgattttgttttggttgtgaatatttgttttattcatacctttgatactatggaaaaaatatattgggattgctaactaggtgcaatactctaatattctagcagttttagaattagaaattgtttataaaaatatgaaattattcttcaaagtaaattcatcagaattgtgaacgcatcgtgtttaaacttgaatgaatcttaaactaataaataggttaaaaaactaaataaatatttatttatgaacaaatttggatttcaaacagacaaaccgaatatttcttttgaaagtcatttagtaaatttaggtaaagacatagagatattattggtaagtctcagagaatttgttttatctttaggagataatgtgattgaagaagttagaccacataggatagtctatgcaaagtcattgacatttaggtatttcctagatatttatcctaggaatagtgatcttataattgggattagaaagaacagaaaagaaccgacaaaagaatatgtagttagtaacatccaagaaatagaaagtattgaactagaaattaaagaagcttataaagcaatatgaaaatcagttcagtgtaaaacactactacatgttccttagccaaatgtatttgactcctttcctagcagagaaattttgaacaagatatgatttattcaaatgcttttcttttcgaatcaaaatatatagttagtactattttagatttagatagacatagacatagagtgcaaccagagtgcataattgcagataaagtcatcatgacaatatacataaaggtgtcaaccaaaagaatacccatcatttacgtcatccttcaatgtctactaagagaataataaaatactagaaaaacatagcttaaataattggatgcatatttagaagaagaattgattgatttgttcacatactacttgcaaaatccaaacgcttctgatttggaaacaaagaagcaacgtgttattgaaattggaagagaattgtttaatgatggagggactgatgcaatggaaaacatgttctattcggtagaaataagaataaaggaggaaatcggaaaagatataaaagaaaatagatcttggtggaatggagtttcagaagactggaaatactaaatataggtaaattatctagggatccgattatgaaacgatatccgacattaaatttaattttgtcgaaccagtttgtagtaatatagaattgaattaatcaaactcggtattatttttttaagcacaataatacacattcggactgcttcccacctcccctccttccttcctccatccgtttcaaagaatcttatttcatatgaacagatttagaatccatttaatcttgaaatagtttgtgcaaatagaatttggcgaataaaatatgataagaaaagggatttattattcagatatcatctttatatctgatgaaaaaaattggatgatgtattggcgaataaattgcctgaagcttcagatcaaaagagaactatactcaacttatataattcaggaattgaaccagaaataatttcacttgaattagatatcaatgaagacatcataagagatattattaaaaatgagaataagagggaaggagataatactaataataatttatcaaattatcttttgaataaattttatcttgatgcgattatagacatcaattcagtcgtaaaggaagcacaattcaggacatggaatgcactcaaagcaaaacctgaactaaatattatagtaaaagaaacacagaatattttggaacagaacgccgaatctaaattgagattagtaatgctgcatattgacctagttggttctacgaaaatggccttaactttacctatcgatcgattgaccaccataatcagatcatttgctcaggaaatgacaaacataatatcattgtacggcggttatgttctaaaatatatcggagatgcagtcttggcttttttcgttatagaagatattactggtgaagaacaaaacatgaacaaagccaataattcgggagatgaatcagaaaccaacaatggtttctcctccctccaattcagtaatgggattagttgtgctttgaccatgattagagttattaaagaagggatcaacccaattttaaatcaatatgactatcccgagctgaaagtaagggtaggaattgattttggggaagttgctgttgtacaatatggaattgatatttatgaatttgaaaaaacaatactaaaaactcctcatttggaccttataggatacaccataagtgtggcagttaagatgacttctcttgcggaagctgaccacattgtaattggtcaaaaattatatgatcaattagatattaaagataaagactcatttagacaattgaagactaatactgaaatttggaattacgccaatcataccgatggcgagctttacaacatctttaccaataattagttaaatatctaattatttgatttggcaatcccaagtaaggtccaactttttttaattattatttaattacacacacggtcttttgttttacttctactagactaggtcaatgttttcttaaagatcagtggtattagataaccaaaacaaaatctctagattctaaacaaaatcaccaaatggtaggaataagaggttttgtctgaataattgtaaataatgaattttgactgcctgttgttaaaaaatctctatctttgaaaaatttgaacaaagttaaagtaatagtaaaaaaagaggaggaagtttattgttgacctaaggcgttatttccgctgtttatttggttttggaagttttcattgtcgcaagatacgatagcatctttaccagatacacattgtgagttttggttagaagattgtgattggcctataccttgattagcagtgttaccgccactgccactaccgccactttgggctgctgcattatttccggtgttttgttggttttgagtatttttgttgctacatgaattgcttaaggagccgcctgctacacattgtgcgttttggttagaagattgtgattggcctataccttgattagctgtgttaccgccactgccactaccaccttgttgtcctactgcattgcttccgctgtttgcttggttttgagtactggtgttattacatgaatcagctacgtttccgccaccaacgcattgtgcattttggttagaagattgtgattggcctataccttgattagctgtgttaccgccgccacctttgccttttccactgccactaccactaccaccttgttgagctgctgcattacttccggtgtttgcttggttttgattgtttacattattgcatgaatttgctgtatttcctccagatacacattgtgcgttttggttagaagattgtgattggcctataccttgattagctgtgttaccgccgccacctttgccttttccactgccactaccgccactttgggctgctgcattacttccggtgtttttttgattctggtcatttacattgttacctgaacctactgtattgccaccagatactacaccgctgttttggttagaggattgtgcttgaccgattgcttggttagcagtgttaccgcctttaccactaccaccttgttgagctaatgcgttgtttccgctgtttgcttgattttgtgaattcaaattattacaagaaacaaaagtaccagttcctgaaacgcacaaggcattttggttagaggattgtgcttgaccgattgcttggttagcagtgttaccgcctttaccactaccaccttgttgagctaatgcgttgtttccgctgtttgcttgattttgtgaattcaaattattacaagaaataagagtaccagttcccgatacacaaacaccaagttgcgatgaggattgtgattgacctataccttgattagctgaattgccttgagcaaatgcattcattgacatcgaagttggccctaccaaaagtaataatgatagtgctactaccgctgcaaatgacgctaggatatgtttcccactgttcattttatattgaataatagatttattcacccccttattaacataaaataagtatatttggtttgctaacaagttgcaatattcttatactctaggatttctagaattttgaaccttgaaccttgaaccttgacaagaattggtatttatcaggttatgtagtaggtttagatggtaatgtattgaatatgagtgatttgcaatatcatgaattctcagatttagatgttcaagcaaaacagccaggaatatcatgaatccaacggggattcaaatcatgaattaatcaaaagaataagaacattagttaacgaaaaccaatcgtttattctatatttataattaaataatgggacaagtgttagatgcatagtatgaatgaagaatattttcgatatcatgctatcgtatttgaataaatttaaataagatcttaagatattatatacatgaagcaaaatagtcgcaagcaaggcaagaatattagcaaaagaccattgaccaagacaataaacagtgaagatgtttacagcatgctattaaccattcctaaaggcaaagtttctacctatggagatcttgccaaagcccttggaaaccccgctgcttcaagacatgttgggagaatattaagccagaatccaaatccgattaaagtaccttgccaccgggtcgtcatgtccaatggcaaaataggtgggtatgcctttggaacccagaaaaagaaagaattactgcaaaatgaaggagtcattttttctgatgaatatagagtaaacgaatttagcaaagttcgttactatccaaagaaaggataacacaattaattagatgtaagtttagccaaatatttaccgaatacaagatagttgatattttaaggtcgtcataaaatattgagttactaaaatatgataaaatagtgaaaaatatataaaaaaaattatgatgcttctaactcgttgatcctttctgatactcctttgacctctttctctaaatcatttttgtattccttcaataaatctactttttcttcacgagttagaaagcttcttgatttctgtactccaacagcgtttacaccaccataattacaaccgcaacccattattccacctcctcatccatatcatcggacatacgatacatagcattcaagatgtatttatatatatcggatacccaatacctttattatctatgcgcggagaaagggtggacatagaaagagagggagagagggagagagggagagagggaggagattgctgcgacatgagaggaatgttgggctttctgatccttttcttactttcgaaaaaaccaatgcatggtcaagaactagctggagaaattgcaattagaaaaggtgagaaaaaactaagtcccggaacaatatatccggcactaaaaggtctaaaagaattaggtttcattgttgaggaaagagatggtaaaacaatagtatatagtttgactgataagggcgagaaggctttgaaattagctaaaagaaaattcataaagactttttttggcatttttccagaataatatcttccgatgaaaccttcataggatgttgaatttatcgtgaaaaaatagagtatttcaaaaataaaatatgtaaaaaaagattaaaatgatcttgtaaccttgggtaaataaggtctttaatcaattagaagatataaacaactgaacgttgttattagtagtgtctgccacatatacacgtccattagaatcaatggttatactctctggtttcgaaaattccccgggaccttcacccatttgtccaaatcctgtaatatatgtaccgtttttcgaaaatatttgaattctttggttgtctgagtctgtcacgtatagattttcggcattgtcgaatgctattactgctggatgattaaattctccggcgccctttccttctgtcccccaatccctaagaaatgtaccgttgttggagaaaactttaattcgattattcccataatcaggcacaaaaacattatttccactatcaactgtaacatcccatggcatttcgaactgaccattccctgtaccttcgctaccccatgaagctatgaaagtaccatttggagagaacttttgaatagtatcaagatctctgtcagatacaaagacatcattctgggaatctactgcaatgccatgtggatgtagaaaattcgcaccactattttcattttcaccccaagatgttatgaacgtaccatttggagagaacattacaactcgtttgttattttgatctgtaatgtaaatattcccttgtttatcgatttcattaccatgaggatgatttagcggagttccattagcagtttgatttccccattttagaataaaatttccattcatatcatatttctttatttcatttgactgaatatcgttgacgtacaagttatcattactatcgactattattccttcaggctgaaaaatttgagtagaatttaagttttcagtttgtgaagctatctctcttttgaattcaaattttgtatcaggcgatattgggccaaatgaaggagactcatgattttgagcaaatataatatttgtcgaacaaaatgatgacatcaaaacaatagatatagtacaacaaagaaataatttgtagttagtttgcttacagttccacatatggaaataatggctaatatataatatataacttaaatccaagtcaacgcagaattacagaaaaattgagcaagatgattcaactttgatggctagcaattgaatgattaatccgcgtatagaaaaatcaagtgcggactacaatccaaaccaaaaaaggatattggatctctaattcaataaatcaagacacagttttgtgagtttatgcaatattagagaaataacaatttattcatgccatctacatagttatatattatgaaactgggcagattcaataatataaaggaatcaatttcaaagttttttacagtaaataattcaatctatactgctgctattttcatagtcataatcccgcttattttatttttctatttacaacaagaaacagaagagagtataagagacagcatatttgaacaacaaaagcaagttcaaattgattcgagtcgtgcgatagcacatcacttgcagtcggacatagaattgattttatcaagactgcaaggattagcaatgtctggtaatattcaagatggagattttacatccaatttgaccaaaagcttgttagcagattattacaacaagataaattccactacccctgtcgacagattgttccttcaaaataaaaatgggatcgctgttattgatatggcctctagtggaagcccctcttatgcaggaaaggacttttcttttaggacttgggttaatcagacaaaaaatacaatgtctcctgtaatttctgacatgtttgttggaattgatggtaaaaatagaattgcaatgacttacccaatcatcacaacaaatatcagtggttcttattataatggcttggtcggggtagtaattccaactaatgaattttttaactattatggcaatgtctacgacatacagtcacagtatttgtcagttttagataacagggatatgctgttggtacatcctatatcatcaatagtaggaaaacctttttttggaaattttacccagaatttaactgggcataatgacatgctaaacaatctagtaaaaacagtcatgtcaggggctccatcttctgcagtatacaagttgctaaacaatgaaagactaactacgggatccccggtcatcattgagggcgctcccaagtattctgtatttgtgatatcgccaacctcctttatttattcaaaaattaatgaaataataaacatggaaaggctgcaaatgctgactttaataataggaataatcgcagtagtacttttgttgatcttgttcctaagtaaagttaacagtaccttggataaatcagttaagaaaaggaccaagcaattggaagatacaaataggaaactcgaaatagctaatagaaatgtccagattcacgataatatgcagaaggaatttataaacatagctgctcatgaattaagaaatccggtacaatcgttactgggcttctcagatattttaatgaaatctattggtaacattgagttatataaacatcctatggaagcaataagtagaaatgcgaaacggctcaagagattggtggatatagtctttgaaatatctcaactagataatgatctattgctactaaagaaaggaccaatcaatctcaagaaattgataacagagataatgattaactaccaagatcgtaaaaaaggtgatcgcaagtataatattatacttgaagagtcatatgctcctaatgacagtcaaatattaaatgctgacgaatctcatttgacgcaagttataataaacttgatagataatgcccttgaatttacaaaggacgaggatgaaataaaaataaatatgaaaaaaataaacaatggaaaggaaatagaggttactataagtgacccgggacatggaattcatccagatgatctacctctgttatttactagatttgtaaaaaaatcgagcagaggaacaggacttggtttgtatgtttctaaaaagataatcgaagcccatggtggaaggatttgggctaaaaacaatcaagatggaaagggtgtaacctttggatttagtttgccggtacaagaccaactttctaatccagatagacaactttgatgatcgataattaaatacgattatggatttaagatcaaaaattattcaacccattgctatcaatgggtttatatcttaaaataagcagatggattaggtaaagcatgatacaaagatacaaatcaatatagtatcattgctaaaagcacaaagatttaattagttagtatctagctcttctgcaaccgggctactttttgaccaaaataaattctccaggattcgggcaaacattttaattttgttgctcttttcattttggatataatttctctattattactatcatttatatataaactaacaatatcatttatagtaacattatttttatccctgtataacaattttatgtcgtccccggcacctaattcaccttcttctaataccttgtaatatattcctggacgtcgactattgacgaatttctctaagacatccatgcgaccaaatttgatccctagtttataacaaggcattcgaggttgtgttacaactaaccgtgttgaaccgatttgatattgatcacctatgtttaccatgtcttcggttaatccctgagtagtaagattttctccaaacatcccgaaaggcataacaattgtagggtataccgctttccaatatttgtaatgttcctcaggatatgaataaaccgccttgtcaaatccaccatgaaccgacaggtctgcttgtgcatccccatccaaattaagtgtggttacttttacccttcgctctacaggttctttgaatatgctcgtaacaacttgtcgcttcccatatgaaacctgtctgggtaatcccacgttaactgaaattactttcatcataggtcttatctacctaacatagaagttattcttaactttaattctagacttgatttcaattaccatattttcaattgtctagattagttccaatcatattttgaaattcgcaagtctagttgaattatattttgaaattcgcaagtctagttgaattgttattattccgatgacgtacaaaagcatcaatggtcccactacaaaccacatggttattccgctcccatccggagttatgattgcacccagtatgactagaaaaataaccacgtatctcagattatccttccagaaatttgtattaacgattcgtgttttggttagagcccacatgactactggaagttgaaaggcaaatccaaatatcaacaacatattaacgacaaaaaggataaaaggagtgatttcaaaaaaagttagtacacttatagcctgtccatattggtacaagaaatcaagagtatatggaattgcaacatagtaagaaaagagacaacccattacaaataatgatataatcggtacaacgattctcttaatgactcttttttcagaataatggagtgcaggacttaagaaggcaaacagttccccaagtatgactggcaaagaccccacaattccgattattatggccacgtatacctgcgccgtaaaagcctgccctggagtagtttgtatcaagctaacgttattaggcagtaagtcgttcttcatctgggaaattacttgaatagataaactgttaaaagtatcaggatgaaggataaataaactatatccgtcaaatttgatcacagtgacaccaagggtcatacacacagaaaccaatatgatcattacaatacatattctggttactcttactctgagttcgtataacagttttacaaatggtttatcctcagatatctttatcacccttgtctaatccatccaacctaataaactgttttagcaatattgatttcttaaattttcatcttggttaattagcgatgtttcgtaaaggcctatatacatcaaatgggttttgacattatatcacacggtagaggaaatgtaattgagtaataaccttgtagatagttttggaagaatagcaaagaaactaagaatttcaataactgatagatgtaatatgcaatgtgtttactgcatgccttcaaacaataccaattggttagagcaagacaacattctaagttatgaacaaataactcgtcttgccaagatatttgtatctttaggaattgaaaagataaaaattacaggaggagaacctacagttcgaagtaacgtagagaatttaatcaaatctttgtcctctattaaaggattaagatcaattagtatgactacaaatggaatactagtaaaagataaaataaagattctcaaagaatctggattagaaagtttgaacattagcttggatacattcaaacctgacagatttaaagccatgagtggaattgatggcttttataaagtaaggaacgcaattaatactgctatcgacgaaaacttaccagtaaaaatcaatactgtaattattaagggatggaatgatgatgaaatatcacattttgtaagattttcaagagacactggatgtattgttaaatttattgaattcatgccgttggatggaacaggcatttggtctgaagaattggttgtaagcaagaaaagaatgatagagataataaacaaggactttgatcaactatctccactttataatgataaatctgaccccgctagattatatacctttgaggatggaaaaggagttataggatttattccctccatcacagagcctttttgtcagaactgtgatagagttcggattactgcagatggtaagctttacagttgtttatttgacaagtcaagcaatgatctaaagagtttacttgaagagggaaaatcagatatagatataattaaatgcatcaacaagtcagtgcaggaaaaacctgaaggaattattaaaattattaatacacactcattaaggccaactttgaatgttatgcacactattggtggataaacgcctgaacgaaaaacaggtgtgcagaaaatatgtacgacgtttaaatttggattccaaataggaagaatataccatttctttggtaatcgcgataaatcggatctactctattatgttttatttgatttgatttacagtttcagataagaaaacaaaaaatgcggattatgtacaaaagacaaaaatggttttacatcaaaaatgcaaattttatactgaaatatttacttgattatagcctccagcaccgcttggaaatggctcttctaattcagaagtctggatctgaccggtcttgtctgttgctctcacgataattttataatcccctttatctgcagctgtaaagccacttgtccacaaaacccatgtatattgtgataatggatctttgactatcgcagttttccacgtagttcccccatctacacttacttcaactttggatattcctctatcacctgcaaatgctatcccagcaataggaatgtttttaccattcaggaagctgctattaggcactaaattcgggaatctatcatctatgggttgattgccaggtataactatagatgaataaatatttttgatgtcattatttgtccatccttttctttgccaaaagccttcgtacgttttatctaccaactctatttctgtaatccattttggattcatcattccatagaatccgggcactattgctctaacaggatatccatgttcgctggtcaatggcgaattattcatgtcgtacgctaaaatggtgccatccatcatgccattctccaatggaattcctacatcatatccatcagaacatctaaacacaatatatttaacgccagacttaaccccagctttagaaatgatatctctaagtcttactcccttccataaagcggtgcttacaagatttccacctattttgttgctaatacatgtcaaggttgcaaattcttcaactgaattcatatccttaagatctgcatagttaattacaacagggttatccactaggcctttgatagtgagattccagtcactagcattgatagtgggtattaccgtgtttatatctatcctataaaaaataaaggttggagtcacctcagcatctaccaggggagtaagaacaggattttcaaaaccaggaggtttggattttgattgcaaaacttgctgaatagacttgtcaagggcttggggctgtcgttgctgttgtcctgacccagatattaaacgattaaatccaaaatacactaatggaagggcaataactgaaatgatcaaggcacggatcatatctctcttgttataatcgatatcgaaagttttgttacttttatttaaaacatcatcatcatcattagaaggaatttcaaccagatcaattttcttattcttattcttattcttattaccaaacaagaatgcaaagatcaatccaaaagcggcacttggtaataaaaatattacaaatgaattaataggaatagatacagattgtccaggcgtggtactaagcaccaaaaaaacaattgttagtataatcaaaattaaataagaaatgaaagtagatagtatggatttaattacatagtgtggcgatttcattttcataaacaatttacctaaaatgataccgattataccccaaagtaggatgtttgctaccgttgcacctataaatgtagaatatttagctaaaggacctagtgttagtacctgcttgcgattcgatttcgccagaagtaattgagattaatccctgggaagcaatctcaggtatgaataatccattaatggttaacttcaataaaattgataatgatagactcgcaattcctgcagcaagaccaaaaagaaaaaatacaacataattattgccccttatccttaggaccaccatataatcaaaaaacatgatggatttaaggttttttccaaattcaatcaacattcattcgtatcagtctacacgtaatttgacccaaacagtgactttacagatataaagcctcgacactcatgatatggcacaatcttaatcttatatagataatttattctaattgtaaataatgggtggtatgattgatgtcggcgacaaaccagaatcccttagaactgctgttgctcaagcgcttttatcatttgataacaaaattatgagcataataaaggatggaaattccccaaaggggaatatttttgaaatagcaaaagtgtcaggtactctgggagctaaaaaaacttcagatcttattccatactgtcatcctattccgattgatgatgtaaaggtggatgttactatcgaatctagctatgttaggattctagtcaaggtaaaaagtatttggaaaacaggtgtcgagatggaggcgttaacgggagcaactatcgcggctttatccgtatatgatatactaaagcctctggacatatctctatccattgataacatcaaattattagaaaaacatggagggattggagattttaaggaaaactatgataagaaactccaagcggctgttattacaattagtgattctagaaagaaaggtcaagatgaatctggtaaattgatagttagtgcccttacagcaaacggatttaatattgttgactataagataattcctgatgaaattaaattaatagagaaagaattgatacattattctgacaaactcaaagtaaatatgattattactactggaggaacaggggttggaccccgggacgtcactccagaggctacaaaaaaaatcatagaaaaggaagtgtcaggtatatcagggaatcttcgaaactatggacaaagtaggacccccctctccatgctctcacgtggggtttcaggaattagagggaatacattaattgtgaacatgccaggtaacaccaatgcagcttctcaatccataaatgcgttatttccaggggtaatgcatatttttagaatgattgcagggcatggtcatcataaatagcagtgcagtgaaacatacacatagatgcttcatctagtaaactggatgtcgttaacatatgagtaaccgggcaaaatatttacttgtaccacgtctcccttaaaaagatttattacattctcaggaacagttacataaccattagtgtcgactatcaatgaaatactctgggtttcgcccattattggttttgcatagaacttgtcttttatttttataaggcggacatatactatttttctaaaatcatgaaatttcttccgacaagtccaatcttcaaccattatggcagaaatggcaaaaacactaattttagtttgtcccgaaaatagagagatcaagggccttgcaaatacaaaaaaggcattcaaactgccttgaattggtccgggcataattattattggctttttattgacgacggcaagtccggttactctacccctgtcgagttttattttatgagctataatatctgacgaagtcatcgaatcaatggttgatttcacaacatcctgtttaccggctgatgttcctcctatcgttataattaaatcagaagtttttacggcatgattaatttttctttttaggatgtccacgtcatctggtgtaactcccatatctattgatatgccacctaatgcacttactaagcaagaaataataggaccatttgtgttgactactttatgttctttgttttcttcaacatcgtttgtaagttcgttacctgtaggtataatagagactaaaggccttttaaaaactgaaattttactaatccgtaaagaagccaaaagacccatgtgttgaactcgtattgcctgttctttacataacaccttttttccttttttaatatccgatccagttgaataaacaaaacttgctttttctacgggttcaactatctccactagatcgttattgattatttttgtgttttctattggtattactgcatcggattttaatggcatatatccaccagtttgtattctataagcttctcctttttttagaatatggcgtggtaagatccctaaagttgattcagagcgtgaaatctttaaaacaacaggatttttctttgatgctttagtcacatcgctagatcggattgcatatccatccatgtgagaagaatcataggtaggtatattttctcgtgcaataacatcatcttttaggatccttccaagggattcaaaaacaggaacaagttctatattcttaggaactgttatcttttctaagagaattttgaatgccttatctacggtaaaataggcattagaattttttttcatatactaattcattcatttagaaagagaacgatattaaatttgttcaatattatgcagggcgttttattcaaatttttacttccagagtttgaaccaaatacttgtatttgtatttgtatttgttttctcaatttgtcttgattaatttcccatctacccatttttcatcgccttttgatagaatttcttttttccaaattggcacctctcgtttaatctttgcaagaatgtatttacaggccgtaaaggcatctttactatgaggagttgaaagtgctatgattacactgttgttccctaaagctaattcacctattctgtgaactatttttatttttttaataccatacttttccatagccaatttttcaatatttttaatcttattttcagccatttttacataagattcataatacattttttttacctctccattgattccaaagtttcttactgaacctacaaaaattacagttgccccggaatgtccctcagtgtccaccatcaaatttacaatatcattgatatcaatttctgattccgttattctttcagatgatgatgatggctcgagtgagtcttggttaataatagatctacgtggatcattactagaattaggttctgatttattggtctttttttgcaaatctctacttctcaaatcaaaactatcctccagaaattggtggtagaagggccacttcatcattgttttttagaattgagtttgagtttgaatcgacaatgcgataattgacagaaattttcatgttttttatgttttttatgtttggataccgggttagtatgatcgaaacaagttcctttatcgaagtatttgtagacaactccattatttcctctttttttctagttgtttcatgtacaaaggcaaaatataggacggtgacacgaatctttggtatcatctgggttgtcatgaatactcctactatttaaaatgataaaaactatatgaattgtctgtgatttggtctacgtaaactaaacccatttcaaataggtcataccactaaaacagtatgttaaccagaaacagtatttgattttcaaaatgccatttttagtatgttttgaatagcaaattataaaaaatgtagaagataatctcctctacccgagagattgataatagcacccattacactatttttaatagttaaaaggtattcgatgggcacaaaatacatcacgagtaaaaaatatgaaaatcgaatcaaactaaaaaggaggagtaatgaaattcaaattaaaagcttgtcaatttccttgtcgatttctcttaagataaaatccagatctttttttagattatttagttcttctatagaaagattatttatttctatatctttgtaataaaacctctgagacccaatcatagaatgagataaatctattctgaaaagaggtttttttcctattgtctcattggatggctttacatccttttcattacttgtctttttcttattttgagaatcgactttaaattcaacattaggagcatgtgaaggagaatgaatctcgatcaccgaagaataaatagaaatcttattaaaatcaatatcaagggtttgttttatttcgtttaggattttttgtctttgattatagttcttgttaatttttttatttattctatttcgtaaatctttcaactacaagaaaatggatgtaccatttttttataaatctttaaaggttttctcgctttcgaacaagctccaccaaataacccaatggcaaactgccaatcattggacaaatctccaacgatagattctccagataacaaaccagaattaagagaggagatgaatgaatatgacatagttactcagtcgacctcatgacccgggtcaactaaggaacatcctttattttttagcttgttgattgatggtgtatcatgacgcagacattaaagttaaataactattctacttttttgctttaatctgtagaatttttcctcatattgatacgatagtttaatttccttggaatattccttgagtattattacctatcgttaaataagtaactttaacaacttccattatgaaattttatttacttttatcttcacgcacaatatgaggagcagtagccttgaatatggcataaacatacttgccctcgacgatctttaaatgttctttagattcctgggtaatccttgatactaaactgatattattaataactaaatgaatatttagtatgcctgttttgatgtttgaagcataaatggcggctatttttgtcttaatgatgtttcttgcgctggtgcggacaaaatctacagccaagataatatcttcaggttttattaatactcctacagtagaatcaattggataatcccccaggatttcaaatttatgttctcctactttgaaagtagtaatcccatttgttgagtcaataacacagccctccaaataattatgatccttttgaaaaaactctgatattgaggaggttgacatgggttgattatttggaaaagctagcattgtttttaatgtatcagtctttttgataacgcctttttctaataccgagacagaatcagcaagtgcatatacgtcatcttcaaaatgcgttacatatattcccaatactccctcttccttgagtattcgtcgaagatcctttctcaactgaactcgagttttagtatcaagatgaacaaggggttcatccatgagcattatttttggtttcgtcacaagcattcgcgctagggatattttctgcatctccccaccacttaacgcatgtatatctcggtcaagaagattggacactccaaaggactctacaagtcttttaatttgtgattttttattgtccctgacagattttccaataccaaatacaatattctcatagacattcaaatgcggaaagaggcttgggttttgaaaagaatatccaattcttcttgtttcaataggtgtactggttatatcaacaccatcgatgtagatagaccctttttcaggttttgtcaatcccactattaagtttagaagagtggatttaccacttccagtgggacctatcaataccattattgtgttatcctgcaatttcagatcaatcggtcctaatgtaaatcctggaaatgacttggttaaattaattatttcgagggtcaacctaatctctccctcatgaactttcaaaactaaagattttattgttttttctagtatcaccacttgattttttcataattatagaatatacaattatgagaattattgaaagtaaaatggataagattattcccggaatagcttgtgataaacctcctacggcattatcttcatatatttggatagaaatggtatggggattataggctaacatcaaagttgctcccaattctccaatggcccttatccatgtcatcattattccaatcaaaatccctttttttgcaagtggaatcgatattcttacgaaaacctccaaatttctctttccaagaactcgtgcaacattttctaatgatttatcgattgaatcaaaggcagccatacttgcaaggatcataaatggagaggcgacatatgtctgcgctatgataatcccaattattgattgagtgaactcaacattgggaaacagtctatccagaaatgattggggattaaacactcccaacagaagagcaccactggctagtggtggcaacactaaaggaataacaatgataatttgtgcaacagatctgcctggaaatttatatcgggatagacaatatgccaagggtatgccaaataatgcaatcagcaaagtggatactgacgcagtacctatgcttaaaagaaaagcgtcaatgactctcggccttatgagtgattctagtaagctgttgggttcaacaaaaatcaagatactaaagagcggataaataatatataacaaggcaattccggataaaacacatattacaagtttgaagttgatcaatcgggtattattcatagagttattctttgaaaaaactagttactctgattgcatttattattatcgtgtctcaatcgatatattcatctctaaccataatgcattatcgaaagttaatgtccaattaaagtaattttgtatccgcttatggcgtttcatgattttttgaaaatactttattttacaatgaaaggactttacatttcaatcaagatttgaacaatattacatcctctaaatccctgcatgtgggaatatgataatagtcagtttttgcgattcttatagtgagagcatcgtcattcatatcgtctttttttttaacttgattcacaaaaataggacacaagtagaaaaaggaaataccttccttttttatagtttcatttgtctgtctgtctggttgatactaatgcatttatccatgtagagatgtgtaattcagccaaaatactgatctacataagtttccgaaatttctatataaggttcctcaattgcattctttttagtatttagatgattgatttccgatcttatttcattcctatgaataattagtttttcgatttctgaatcgatgctctgtatgcctcttaatctattgataagtaatttccaagtttcatttttggagtttttatcggtattattttcaataccattagctgcatttccgccttgagatgaggtattagttagaaagtaaccattttgaagtgaaattacgagctgactcatgtttatgatatcttcatttgttactccattgttcgctagatgtagcaataaagaggccacttggctttggattagtaaatttgatttgtggtgaggaatttcattttccaattcatctatttttgcactcaattcttttattttggtttcaaaacctagtttgttatcatactgattctcaatatcatttagaaactttgtaacggcgtcctgtggtagtatatgattagctattgcggtttcaataatcgtaccataaagttgtttaggttttttaagattaaaccccatcccgtcgagttcccggtatattttcatagtttgtgtagagatgtcaagttgagaatttgtggacgcaatctgtttaggcaagtcctgatgtaaaggggtatttagatttatgtcatattgaatacgatctatttcttttcttaatgattgaatttgtttgtattctttcagtatgtcaagaatattgtagttgtgtgtcttaaagtcattaattatagatgaaaaaaatatgatttcttcatctagattcatgttgtaattatcagacaattcttgttttaagaaatcataccactgcaaatgagctaaaatgttgttgtttttgctagtcgtttctctaaggttaatttctagagccgattttttattttctaggaaggatatgtcaatgtttagggatttcctatacttttcttgttccttaagctctagtttgatttgattgatatagtaagaaacttgcgaaacaaatgggatttcaatagatgcatctggtttatggatttgcttcgttaacgtatcacctttaatctcaaagttttgtggaatatcattaccagattccctttgatgagcctatccagataaatcatgatttcagattcatcctcattttcatgggataaacaaagattattgtctttgttaatagagaaaggggatccacattcaagagagtgaaaaaaatcaagcaaatctttgataaatcctataaaatcggatggtttaatattatattttttactgttattgtaaatatcttcaatgaaatggtgaaaattattttttgtaaatgcatctttatttcttctcccccttctttccgttaacccatgagatggagatctaaggggatcattatcattttttcctatttcccagttagttgttccatttctgatacattccaaaagatcttgttctggagcaaaatcatctccatcctcaaattcatcgttgatacccaattcctttagaatttgaacgattctaaatccctgagcacattgttgaattgtcattcctgacttgcttacaacagttgcaaattcccttatttcttcaattccaatgctccccagcttatccttccagcgtttgaccaaattgtatacggtgcctttggatagattagtttctttgactatttgatcaagggttttaccgttgagatatttttgaataacaatgtcatttctaaaagatgtaattacggtcttcataataattatgtgatgctagcttaataaagtagtcaatttgttactcattttagtcagcattctagtcgataaagtcaaaaaaatagtcaattaattagtgcttaaaatatactctagatagcatcaaagaaaaggtcatagttagagcgtattcaaataaatttaatcataaatagggtatagatgacccagtctaaatcatattgataagaaaatattgataaaatcgattctaatcccaagaatatgttctattgcaagtagggtttagcatgtatttttttgcttagtactatagacatgcttatagcagctattgagaaaaccagggcgctaagaaatatcagatcaaaagagaatgaggaaggtaatgatttagttattccttgtatattaattagcgactgatttgtttgcatatacatcgcagccaaagctggtccaattgacgaccccacaattctcaacattgtactaatccccatcgttacacctgtaaattcaacaggtgtagatagtatagtgacgttaactgcccccacggcagcaagggagaggccagtcgataatatcgccaagcctatagagatggagatttctgttgaatgaaacaaatataacatcgaaaacccggttgctgtaagaacagtacctataatcattggctttattgatcccagttttgaaatgataaatccagaagtaggtccaaatattaagaggactatcgcgaaaggcaattggattttaccagtattgatagcattttcaccaaatccgataggttctgggctttgtaccagtataggaatagtctgaaaaaccataaacatcgacaagcctactatcattatgatcatatttgaaagcaagattggtggtctcaggaaaattctaaaatctattaatggatatttgattcgcctctccaaatgaacaaataagattagagatatcactccaattatcaaaaatggcgcaatttgttccaaggaagaataaggactagtaacagcattaccggaaaaatttgatgtattttgatctggggatggttgcaagtatgttaaggagagcagaaaagaaacaatagtaatcgctagtaaaattgatcctttaatgtctatttgagaataaatcatttgttttttctttggaattttgtttgaagaatttttcagtaactttgtatgtttatcttgtttttcgcccttttcctcaagattattattgtcagagactttaacatattttcgtatcattagcagcaagagtatcgaaataggaattattgtaaaaaatgtcatcttccatccaaattcatgaataatcaaacccccgactgataatccaatgactgagcctgcagcaaacatcgaagtaatgattccggttgtgatggaaattctttcccttggaaattgatctcgaataatgctaaatgctatagggaacattcctagtccaatgccctgaattgtccttgctattatcatagtaagaaaatcgtttgcaaatcctcctaaagaaactcctacagtgtatatagccatgataattagcaaaactttttttcttccatagatgtcagacagtttacctgctataggggttataactgcccctgctatcaaataagacgtcaaaatccatgatgataatccatatgagacgtcaaaatcattgattagagtaggaatggcaggtatcaacattgtttctgcatacataaccattgtggcaaggcaactcagaatgaatagtactttccatggttgtgataccgttagtagacttttgtaatcaaaagaggacccctttattcttttagatgtcagtttctttaaccccccaattttttattttttaacccttttaccaaccttagagattagtttttgtggatgtatgtcgtttttcaataataatgttcgatgtaggttgattgattaattcccgtttttgtttgatttcttctgagcaacttaaattgaatttatcttgcaaattaagccacatttgtaccaaagttttttttgttgtggaaatatcctcttcagaaatttgatcgaggcatattttttttatttgagagacacattctatagtttcatctagaaattcgtgtgccttttcggtcaacaatatgcgattaattcttcgatccttcgggtcgatctttctgattacaattgcatccttttctaatttatcgattattgggataagggtcggcccttctaaagataacttatcagcaatttccctctgagttaatccagcagcattatttgcaagtattattagcactttccattgtccaaatgtaataccaaatttcttacgtaattcttggtctattacataaactaatgatttacccatcctattgatgataaaaccaatgctattctgaaaatcatacttaatcatatactatgcactaataagtagtatactaatcaatagtatttaaatgattagttatagaaaaatgataatggagtaattgaacgcatctctgcaatttctattcaaaataaaatcaacaaagattgtattaatgacacatactctgtcatagatagggcatcattgtactaaataatttgcgatattgtttaactaaacaggagatcaattacgaaggagtgagttttgagggttcatcctttacgtgggccttttttgaagctatcaaatttctcagtttatgaatcccatatcctgattttgatgaaatggcaatcttgtcgattgtatcgtccatgtatttcattatttcttgtattttgtctgatttagtagtctctactttggtcaacactatgtataattttgacttgtcgattttgagttcctcgagaactttccaacaactagaatactttttgccaatatcctctaaattctctgaacaatcaatcaagaagaaaatcaaatcggcttcaagtgattcttctaatgtggatttgaaagcgtctatcatgtaatgtggaagtctgctgataaaacctactgtatccacaaccaagacatctacatcacccttattgtcaatattactagaattgtcgagtgatcttgtggttgttgaaagtgttgtaaacaaattagcagaagtttctttattttccttagtaagtagattgaaaagagttgtttttcccgaacttgtatatccaacaagggaaacgatgaacattccttttcgtagtctttgcttgcgatactcgtgacgcttgagatttgcatcttttaatttttctttcacaaatcccatctgtcgttttaaatcacggaattgaacatctacgatgtattcacccattcctccttttcctaccctctcattacttttactcatgagttttgcattttctcttacacgaggcatcttgtattgaatctcagctaattggatttgcagtttggattcattcgttgtagcccgagaatagaaaatatcaagaatcaatctttctctatcaattattggaatttctataagttcttctaaattaaatatctgttttgcacctaaatgttcatcaacaaatattttttctatattacctgcttgtgaaacaaattgttttatttcttccgctttgccaaaccccataccatatttagcgcggtttaagtacttttgagtaaaaacctttactactttataatctgggattgattcaaccaaacttttggcttcttctactgcaaattcttcaggataagtaactagtattatattggcttgatgcaaattaatgacttttccatatgattatttggatcatatttattatacatatgtattggatatatattttgaaagtccaataagataattttagattatagagcaaatcaaaacaaaatgagaatatattgttactttctattggtcagctagattcagtgctgattacttcactttatcaaggttttgattataattcattagaactcaattgaaaatagaaaagggttagaatctagaggaatatacaagtaattagtttgaaaatcaatatcatatcttatttcgatataaaagacatcaaattggtttacgcacaaataaaaatatcatactgtattttgatcttaattaagatggtctaagaagctgactgtcccattagacacctatttctgctgctaatttcaacatcttctttccttcttttgttagtttattgtaggttctattcttaacgatgtttctttctaccaaccctctctctgaggctttaagcagtaacttgtgtccatagccgtatgcaccaagttttttcaacaagtctctagtggaatattcgttctcacctatagatttgattaattttaccaaagctcgttcttctatcattattttgattaagtttgcatctcgcataccagtaatgacacagattgactatttattagttaccctttgatggcaacaaatacctcatttggagatggtcacagaaccattaatatctactaatctcaatataacacaccaatctcattaaaaggatatctataatttggatattttgtatcatattctgaatacataaaaagggggataatgatcagtttttgattacagatatattttcatatatggtatcaaatgaagatcaaactaaagatttaactagattaatacaacaatatacattattagttcggtctatgagtttcctgttttcgaaatctttgttctctcaggattaaaaagcctttataccccatgaattaataataaatggaatgatattaaaatttttagagaaaaatctatccacattctcttttatgactatgctaagtgcattaatcctattactctccaattcactggttcccaatcaaacctcagctatcactctggaagaacaagaaggattttcaaatttgattctagtttcgacatcagccaatagtcaacaagacccaaacaattcaacttccgttaatgctactcaaataccggaaaaggccaaaggacctgcaataccatccaagggttacttagtcgaggaaatacgcgacggtctttattgggttactgatggagtttataataccatgtttcttgtgagtgaagatggtgtaatcgctgttgatgcaccaccttccctgggtgaaaattatatcaaggcaatcagagaagtaacagacaaaccgataagatatgtggtttatagtcattctcatattgaccatatcggggctgctggaaacatttatccagacaatgtctcgattgtagctcaagaagaaacagccaaattattaaaaatggcaaatgattcaaaccgaccaatccctaccatcacctttaaggataattataatttgaccctaggtaatcaaactctagaacttgactataagggtgttaatcatgaacctggcaatacgtacatttatgctccaggtcaaaagacattaatgtttgtagatgtcatctttccaggttgggttccattcaaggatttggctgtaaccacgaatgtttctggttttgtgcaggctcatgacatagtatcaagttatgattttgatacacttgttggtggtcatctcactcgattaggtactatggaagacgtgaatactcaaaaggaattcatcacggatttgatcaatgcttcaaaggcagcaaatagtaaaatcaactttatggactatgtctcaaaatatggactcacaaatccatggcttacattttctgaatatgctgatgcagtaactaatgaatgcaccactacaatgctaggaaaatggaaagatcgattgggaggagcagagcaatttacagaaagtcattgctggacaatgactgaaagtcagagagtcgattgattagtattattatttatattaactaatcgatcaattcttttataattttaaaacatttatgaattttttaataaatataagaaattgagaaataagtagatccgggttcttttagtccacgaaactactctaaaccattagataacgtttaatagtatttgtattactcgagtaaacacgaaatacgaatccataccaaatgaaaactatgccttcaaattgaacgattcttacctaattaccaattatcatataagtatggtctttgcaatttaatcatataaactctttttccaaactaacattaatgatcttggtaatgttattgattcttaattacaccaaattcccaaatttcgtcttttcccaaaataataaaatcaacgttaatctcattgttaacggtacatggataagtaaacgtgacaatctcaatataacaatgtccttaatacctccaatgccaataattgatcagacaacaaaaatcaactttgaagtaaaaaaattggatatttcaggtttttttgacactgcaagtgcaaaaataacaataacggatcaagatgagagattatataaatttgacaataaattttttccaatagtagatggaaatgtttctgtagattatcttttccctgtagaaggcgaacatgaagtcatcttacagctatataataattctagaccttttaccgtaagctcatttgatatattaataccacaatcggtccccaatggtaataatattgtatctaacctatttggcaatcagttccctcaggttatttaactctaactaaccaagttcattttggaatgagatttggcttggaatttataaataaacgatttaagatcttatttgatcaatagttataaaagaaattaataaaaacaagtcattattcatctatttcttaacccattcatcaccctttttcttatattctttcttcacagcagcccaagctaccttgtgagccacttcttctacatcctcctttgcaccacccctcctcttcttcgggtcttcatattctttgagggcgctagcatgtgctttcttaaaaatatgctgagcatgttccggcagctgatctattcttttctctgttgcctcagataattcgacgtcttcctcttttttccttttgtcttttccaggcatttcaatcataccttaaccatattgataatcttccctgtcgaatttcacagtgattaaattctgtttcatttagcattgatcctctgtgcctctttttttgaaccatacatcacaatttttcatgcaaaacactgggcaacatacattaaatactaaatgctttgaccaatttttcaaagtgaaaattacgattaataggcgaaatcaatgtttgtaaaaagaatcgcggatgatcaaataatcataccaaatcgatagtcacttaagatgacctagtctccaatcttgaactaaaatagtaacgctttaccatttaaccgaatcagctaaaataaaataagaataaaaaagattaattcgtatccaattcctttattctttcttctactccttgaactttcctcttcaaggactgatgatattccttcaataattgaattttctcttctttagttagaaaacttcttccagtataacttgaaccatagcaaccgtaacccattatttcacctcctcatccattccatcggagttacgattcataaagaataggacgtatttatagatatcgtatgtccaatatcatttttttacaatgtacttatttgagagcagcaggaaagagccgaaggatgataatttttttgtccctctattaatttctgaaaataaactacttggtattatttagttacaaaatgattaagaaggaaaaacgataatcgaagtaactatttctactgttattacaatgtgctgaaatttgagtatgttaaaaagatagacaaaaaaaggcaaatatcaaccacctgtactaggatatagcttcctaattataaccaagatatgaatttcgatttgttaaccattttggtaaatggaactcggtcaaataaagagggattaacatctatgtgaataactttcaaattcttgttaagatattgtcaatcgagttggaaaagaaataatggttactatgaaaatgttcttcgatattattacaattaagacaattccaagtaatgacttcttcacacgaagaattagatacattcatgcatatttgatgaggttctaaaacagatccacattttctacaagaatctgtattgtgcaatgactatttcctctggtttagtcaacgttttctaaaaaaataaaaattcttggacttagttctgtgctgctgcgttacttccagagttctcttgactttggacgttgatgttgttaccagaacctattgtatctgcacctgatactacttggctgttttggctggaggattgagattgactgatgctttggtctgcagagtttccaccgttgtagtcattgtcatcgtcttgtgctaatgcattgtttccactgttcttttgattttggaagctaacattgttacatgataggaatgtagttccaccagaagcacacaaggcattttgaactgatgcttgcgattgggatatagactgtgaggccttatttcctttctttttagttgcaaaagcatcatccatagccactaggggacttgcgaaaagagctaatgctactactattgcaattgatgcgacaatgagttcgctatttttattttggttgtgaatatttgttttattcatacctttgatactatagaaaaaatatattgggattgctaactagatgcaatactctgatattctagcagttttagaattagataatagatcaaaaaattcaagaagaattagggaggaatttagaaaaaaagattagaaagtatatcatttgaagaataattttgttcatcctagattaattgctcatgactgaaaacgtttcataggttattgaggctagtcattattgtaatagatctataaattgaaatcaaatttcaattcttttgaatgcaattcctagtggctagtattcgattacaagacatttgacgtcctcctataagtgaaatgaagataaaagaattggaaatttcatccaaacacttcatagcatcaaaacttgaccctacacaataagttcaaccacattcatgtttattattacctagactttaggtctaaaaaaattaattagtagaactattaaggagaccatttggatataaaattatgaattttgtatgattttttaaactaataaactaaaattcggataataccagctaaaaatcatattttattataaatttatgatatgtttaatacaagccatctatctatattatcatggattatgataagatttgtaagagtgttttagatatcgatccaaaagttcgttttgcaggcgtttgtgatgaaaccggtgaaacaaaatatggtggcatgagagatggtaaacctagtctactttcacctcaagaatcacaaaaatctaatttgcaagcagtgggtagatggggactgagaaaatcgctaactagtaaaacgggaaagggaatatatgcaatgacagaatatgaaaaattgaaacgaataacatttcctttggatgatgatgatcatctccttgtggtgactacggaagttgatgcagatcacggaaatattattagcaataccctcaaattaattaatcagtaacaaaataagaaacaatctactttttttgatcctttgcatatccattttgagattagcataataaatccgatttagggtcggtacaaagatacagggatatctataatcacaacatcctagcggtcgaactacaatttgttaatcgatacaataaagcaataaatttaacctttactgcacttagttttatatagaccaagaagcagaggaggttgggtaagacaggtataaatacagaagtaaattagaatgttcgttgaataatttatttcaccttgtctattaattagcccctaatgtttgataaagataaacaattttttgttgttaccacaacaattgtttgtagtaatttttttcaatcaatactagtctaatacttcagggatgactttgaaaggcattgaaaatattctttttgaaatcagctttactagaatatactaaaagatataccaataatcgatatgtgtttgtaagatgagtcgacgtcgacttcatgcagcaaaagattttagtcaaaaggaaaattgtccagaaaacaacatattctagaaatccttttaaagcatgatcttaaaatttactctttgaaggaagagaataccgactcggataagcaagcaaataatgacaaactagatgatgaagatagaagggttctagaagacattatttacaaaaagagtaatcaaactgaaaaggaaacagaaatttttgatctaaagacattggttaatttaaggcaagatcgattatggggagcaataaaagaaagatatcgatacaacacatccattaaaagaggacaaaactatttgctaagacatgtagattctaaagtatcattagtagtaatgtatgctgacttggtcggctccactaagatgagcatgaccctgccggtagaaaaattagtgacggttgtaagggcgttttcccatgaaatgtcctcagccatagaaagccttaatggatatgttctaaaatatgctggtgacgcagttatcgctttttttccttccggcttcaacaaatatctaacatgtgataacacattcagatgcgctgaatccatgattaacatcatcaaggacggtatcaatcccatcttaagtaaacatgattacccaagtctttcggtcaaaattggtatcgacgaaggggaaaatattgtatttcaatacggttatgataagagttctcaagttgatattttgggttacacaatgaatgtaacttcgaaaattacttctattacatcacccaatgaaatatctgttggagaaaatgtttataaactactacatccacaaattcaaactaattttaagcaagtcaattttgagaatagtgattggaaatatattgacataaaaacaggaaatccttacaaggtttataccttaaagtaatcggacatcagaataccatcaaccccgtttgatcttattccaatactaatactgcttattttttcccactttgattacatctatacaacataataatccacaggattgtaatggtacgcgtgggcggatatttacacgagcgtgttctacttcaaatcttcctagatatgattaagtgaactaagtcatccaatgaaatctagatcaagataggaacattctgtgtcaaatacattatgatctcaatgatcatatgattttttcacaactgatttatttaaatatacatcagatggtaaagtatttgggtcataccgttcgcgagtaccatcatgcattttaattcccatcattcataactcaggtcaagtgatgatgttcagatatcatcttctggtaactataattattgcagtaattataacatatgatatctgaaatatttctattgcaactgccaattcagttaccccaggtggtgtcgactgaggattcccaaccgattcaatgactacgtaaccagttaaacccactaacacagccgtacccgcaaatccgataatattccaaatcctaccccatctttttaccatgggtaaaacccaaaagagctgtaccagaccagaaatcaaaaaaaacgtagcgtattggataccagcaacaatcgagcttggaactaacatgaggtgtaaaattccagctataccggtacatactgcagcccccagatataggagtgttctattagtatttggcatttctgatcccaatccacctaactatgattaatgctgtgaattgtcaacgctccactatatattccatttgttgtaggctaattcagttcatagattgacacaatatgaactgcatacctttctttacattatctcaacactaactgtggtagtccactgtccacttattgaagttcattatttaatttcatacaataaaacttgtgttaacttccaaatttattttaattttaccttgctctagattaatattaaattgtccaataaaacaaaggaattgttaaagtttttttgaacataaaatctttttgaagttcgtctgattccttcaatttctctaccaattctaattgtttccagaaactctcaaacatagaaatataagaacgacggtgggaatactgttactatatgtagcaaaaccaattgccgatttaaagtcaactgcattatcatccttcatttccattgcaattgaatatgatttatctgtaattattatgaccgatttagcatctaacgatgtttcaatttctttgcattgaaccatgttgtcattatttattccaataatttgtgttactttggaattatagaaatttgatggtagtaacaattttataaactcttttcgatgtaaattcttaaagtcccaatcagggttaaatgcgtcggtttttgtattttcataatcatatttctttttgttgcatatttcatggagaatcttaagaaatccagcagttatccagcgggtaaattcgttttcagttggtattactattttaatttggttgtgtgcagactttaataaatctattaataaattctttatttcaagcggttcctggatcgtcttaatgatttcaggttcaattccatattcaagctcctttactcgcatcgctgctgggatagccttatcccagagcatgtcaaaaaatgattgttgttgttctacaaatgacttaaccgtactgtgaattaactgattaagtgaatttgattgtaccatggtggcagaaccacaatactctgtatcggtaacaccaaaatttccttttacattaggtaaatgtctaagatcggctatttccattagctttctacaataagatatgttatcactatttatttccgtgatttgtcgatggactgtctttctatccctcaacttgcttaattctttattccaaggtaatacttcaattgaaacgctcggagatgtagaatcgccacatatatcaacagtttttttagctcttgaaacaactttgcatgccaattcaagtgcaagccccattgtggctatggatgatgcctttgcaaccaaaaagaaaaaaggtaacgtagctgagcaatccatatctcaatcacaagcttcagttcaaaatgccttgtgtgcttctggtggaaccacattcctatcatgtaacaatgttagcttccaacaccaaaagaatacaagaaacaatgcattagcacaagatgatgatgacggcaacggtggaaactctgcagaccaaagcatcagccaatcacaatcttctagccaaaacagccaggtagtatctgggggagatacaatcggttctggtaacaacattaacgttcaaagccaaacaaacagtggtagcaacgcagcagcacaaagctaagcccagaagctcctatctttttttgaatttacattttcatcttaatttaagattaatataagtatgattaatttatcattaaaacgattacttctatatacaaagatttgtatcaaatcatgatgccttgactactctctaaattgcttcttaacataatgtgtgtatgcaataaaaactatcatgcattaacaactataatgtcagaaaaaccacttaacaagaaggatgacctgcagcaggatgttggcgacgcagctgataatagtgaaattatcgtagacgagataggggacaccgtggagcctggaccaaggggaatggcaaacaagagaaaggaaacaaacagcgcaaacatcgacacggaattagacagagaaaatctcagttagaaatgaatacaatggcactatcgatacatatcttttttcgctaatttgacgtatcaatttaatttacggttacttattttataatcataatcgaattgtatggaaactagaatcctaattaacgaaccgatatcaacactaatccctacgcgcccaattcagagatttagtattacgttaataatagtttcttatcactctaaattcaagaatggataaaatatgaataattgagtatatttaacaaacatgtaacgactaaagtaaattcatttagttttggatcagaataaataaaaatatgttaagttatgatttcgatcgccttaaataaattggtttacttaatatggtaatactaactaaaatactatgtttaatatcaccattaaagaaaaacttgactatgttcaattaggtatgatgatcaacctcgtcatccttaactcaattcactatattggttttcatttaaaaaaataatatgaggtcatttcaaagtcgagtatgaaaatatagctactatttagataatggtggatacattggaccccaattacatagatagtgatgttgccatatatgaccatctctctcataatacaataaacaaacacccgaagcatctgtgctaccagattctagtgcttccttgataagttccattgatgctatattttcataaccgttgtatggaactgtcacgtttgaattgtttctgaaaacaaatgttattggatcattctgttgtatacctgtcttactatcaaattcttctcctagttcaacatatctattaattatttcttcatcagttccttttaatttaactgtagtcccattaaatattgtggagttgtcttgatttgcagtaacaaattcccttcttacttctacagttttacctaatacaatgctcgactgttcatacattttaggtataagcatttaaacatacgacaatagcttgactttttatagattattttaactgaatttgaatcattttatatgggttcgagatttcaaatcaacttattctaatataatgatattgtagaaaaatggctataactttaaatatctcgcatttggtaatatattatggctttaaaagcatgtaaatatgaaattccaagtggtataatagagtgcacaggcgatgggagtcactgtagagtagctgcagttgagatgtttaaagttgacgaactggaaaaatttaatcattttgtgcatacctcaatgacagaagtagaaagaaaaaacatacatgacgatatacttgttaaactaaccgatgacgttaataagttgatccatgaagcccagaaaaaaagacccgataaaagaattgggatcttgaatgcaccttcagggctatttttcagatacaatagtcatattcctccgacgaaggaatggttagaggaggcaatagatgtaactgatgagaatgttgcacggcttttgaaactacctgaggacgaagaacaaaacgcatcataaatattctccacggtatcatatgaaataaagggataaatccaaaattttttgaaaaaataatcaaaatatatctctcaattttttttaatagatcgtgattactttctcatatgtgagtgttatctataattcagctcatgaaatcggctttactaaggagtttaacacgtcttatttaaaatatcgatatcggcattaatccccacgcgcccaaacttggtgatatggtatttggtaacaatttattgactagtcgggagtttaacctttatcccgacgcccgtatcaaatttattctggattccattctgccttgaacgttatccttacgtatgacagcgtttacaatctaattatacttaaaattactgtagcacgaaaaaagaaactggttattatagaaggtttttattttactttcctggcagcgatagccttatagagtgaagatacagacatcatagaacctgtagaatatttttcgttttccacatactatatatacattttgacactattaagtgttacacgagtacatgcagatatctacaaagattacatgctaacattcaatgaataatttcttcacattgatcactaatttgctttcaaggtgctcacttgacctaacaaatcattttcatcttggaacactactgtcccagggaacttaatctccacgaatcaggatgataatttgattctcaatactttgacaaattgactgaaattaagttaaagcaatagaaaaattaaaaataacatctcatttactcatttgtaattgaaataatgtggaggaatatgaaataaattgtgttgtgaaagataatactggattaataacccaattaggatttaaagaccaaggaattcattcaatcttcattatcagtcggttaattctttcaggaagaatctccccttatgtaaacaaaaatggaaaaagagtaagagttgttgttagagcgaccacactcgacattgaattttctatttctaatgaaatgcatatagatatcgatgatctggatttcttaccaaaatgcaataattagaattaacctagattgaagcgttttaattaacccgaaccatcatactatctaaattaagtcaagtaatattttgtatcatcattggatcaacgagcacgttgatatatgcagaagtttgtctctgaaatagcatcgaaatcaatagtgtaaattctttaacacaatctttaaatttatctctactgaaggagatgtagaatcttatttaaaatatcgatatctgcactaatccccacgcgcccacttcataactgaatcctttttttaggcccaaattgaaggatattgtaaaatggatgcaacaacaatttcattactcagggaattttaatcacgagttcgatcctacgtatttacgattgtctatgcgttaatgacttcagaaattaaaagacaatatctagagcctttgttaatattattccatgttatatagaatttgttcatgatagaaaatacaagatcatttcctgactgggaaaatctatacaaaaaccaagatgtgaaatccatgccgtggtataatgaatctcttgatcatgatttagaattagaattagataaaatgaaaatcaaaaagggctccttccttgatcttgggaccggacctgggacacaagcaataaaactttttgaaagaggttttgaagtcactgcatctgatccatcccatgcagcaattcataaagcatcagttcgttataataacaaaatgaacaataaaatcaagtttatagttgatgatattgtaaattctcatttaagcagtaacgaatttgactttatttttgatagaggatgcttccacgtaatttcaccagaaaagaggtcgatatatacagaggaagtaaaccgaattttaaaagaaggagggctattgttcttgaaatgctttagcgaaaaagaaccagtgagagatactggaccttaccgattttcaaatgatatgataaaaaaacatttgaaaacagtagattcaaagtacaaggcattagggaaaccgtttatcagggcacattaaatccgttacccaaagcactttttgtggtaatttcaaagtaaacatagaaatttacaaaaaaatatgcagtctaatctacacatatgttggatattgccactttcctaaacaaatgaggcgacataacagtgtccggtggcagttcagccatagatttttggaactcaggattattaaaggcccgcttaaaatgtgcagcagattcccaaactccatagttaaagaacgtatggcttccagcaataccttgatgtaactgtgctgatataaatccaggttgttgtttcattattttggtagtattctcaaatacttttagaaatatttctatatcctctggctttacaatgaatttgtttaatagaatcacaggattggtattttcttcatctaactgtgttttaatagttacatttgggtccaaatccattattttaaacataacagataacattgaaaataactaccttataagaaaatggtgtaaatataaactccataggttgaccatccatccctagcgtctataacagaaatataagaaaataataattatgctaaattcattgttaattaggatataacaagagtaaaattctatgaagttactatctacttcagataaatatcaaaataataatcttaaaaccaaaatagcttttggaaagtttttagaatttgctatatcctttcaatctactactaagagagaccaaattctagcttctcaagatacaaatcaagaattcagaagtagattctgatatacgatgagttacaacctggtatgactatctttgtagaataaaatatttctttagatgattacataatactaaagactttggattaagggataatcctaataatgcagaaatctatatttcaatcaaaagaactgaaaacacctctcttcttaaaaatagataaaaaaaactaggcgatcgagtctatatttagaaactgaactttgggaaaaaagatattctaactattgtcaagtatgatagttatgagagaaatcaagttgctttaacattgctttgggctttagacgctcgtccatatgaagttacttttttaaagataaaacttattcgccttaaaaaaaaatatggtgatatggaaaattaagccttttctctcaattttttagccatcaaactctttgcaaatgcttttacgtcagtaccatctttttgggtctattctgcttccttctccaaagcatttgcacgatcgttaagtttcttagagacagggttaaatgcaaaggattcactcattatagctgttgcagctattatcactgagaggatagtaattgttacaattacaatattgtatttttattcataatattacaataacgtacatctttttaagatttttattattgggttttattaccatatattatcaacgtcataatatcgactaaaaaaacatgatgaatgtatggaatgtgttgcaacagagtatctgaaaaggcggctcaaaagttgaaatgagcctaaatgatgcaaaacttatctctaatagggacctggaaattccagcttatatgtacatcatgattttaatcaccaatctattatgtgctaatgaggattgtaaaggtcgattcaaagggttagtacgattagaagcacaaataatgatgtgacataaattaatgtcgtcattcatgaaggttaatacgtagactcaaatcatttaatgttatcaaactctattaccctcggaactcaatcccatggggagggacttgggctgtaccttgatttctaaaattcattcctactgcacaataatatctgattagttgttctcactttgccaatcatcaactatttgttttattgctccactatcatgcacagtctgtctgtagatattatccctatatcccatgtaccccatatgattatcaccgtttttagaaattgtacaaatatgggtaacaggatatcgtatgtcacattcgccatctttatttgaatcggtatcaacaatgattagggatgatacatccgtttcgtcaaaattagagggtacaactatagtagatgcagccccgtaagctccaagggcattatgaccttcacttaactcataagggctttttactaaaccacatatccaacagaatggatttatttcacctgctagcatgttatcttcgggattaaacaaattagaaaaatatcctacttcggattgaatagcatctccagaacagggtaaataaggcatataagaaatacaatcatttgggtttgttgagatttggtcattgttaactgcagcacccatcagatgcactgatgttatttctttcgaagtattgttatcattttgttcgttgatgttatcatgaatccattgcagagccgacaaggttactcttgaaccaagtgaatgcgcaataatccttaccttatcttcaggacactctgtcttatagtcagaaataaattttcctaatattggaccattttcattagctattttttttgctatcatccatccgtgataggataatgttgcgttatcaagggagaaagcagtatttgaatcccaactaaatcctatcagcggaatatcataacccgaatctcgtactgatagggatactctgtcagattgctcttctgcttgcaaatcactggcccatataccgtgaacatatattgctagttctccgggacaatctttggtatctaaaattgaaagaactgaaggcaattctacttgttgagtttcattcccattggtcgtatcaaatgatccgcgggtagatgcgataaaaggatataattgtgcatgtgcattacctgtaggatacgcatttattaataagaaaacggtagataaaacaaatacagaaataattgagaataatacacgtctcttgtaattttgtgtataatttaataaattagggccactccaggatttaaatttgttcttgcccgcatctgatttgtttaccatttttatatactatcaactctattatgtaatataatctatagcaattgatttagacgaggatgatgaaatatccacaattccatatgtgtcgaaatcgattcaagaattattgttcaacaattatgatcactaatggttagacattttattaagcatattattttcaataatctttaaattttaccattaatgtatataagtagaatctcttttaaaatatcgatatcaacaaaaatttcgacggatgcaaacttttgtaaattaatgatgcagttttagacttgtattgtgaatatgctaaagacgaaaaaataggttagtctgatggtacttccaccagtaattgtaaacatattaacaatagtacaagttaatcataaatcatgaattattctagataatcgttataagagaagaaattagtttacaaaattgttgcttaaaggagttgcttctatgtgatatcttaaaacataatcagggtccttgtttataattgcagtgtatttgtaaatcaccaaattaatattaacagtatcctctttgccatcatccgtaattgcgatatgacttccatttccaaaattatttgtttgattatacttttcagatatccaatcaagaatacctatttttcctgctttttgaatataataaggctgagaaaacaaataaagagtatctgatataggcatcactaatgagatattttttccgttaaacttgactgtttgtccctcatttactttttcgttaacaagtaactctatgggtttatcatttatatcaactgaaaaattccataaaccttttccgaatagatttttatcattgtcgataaaaagggaatcaaaagttacattgactaaaactttggaggagttggagacattatgagatgtatcatttcttgcgaccgagaatccatcataagagtaagaaattattgggattgtagagaaaataacaagaataagagttaaagaggtgccaaaaaagtttgtgaattgaatttgatcatacatttctaaatttatggtaatgatagtatttatgattacgttaatatcaaagaattcaatttctttccagataaagtggcttttattttttaattgttaattatcatttaactttgactgaatcagagttaactgaatcatagaatcaattttaataaataatttattctaaaatatgaatgaaggcaatacatttgagccgtccaatttatagctccgtaaattaagtcataaatatgttataaccccattaccgttaccattatcacagtggaggaacttaataccccatggatgaggactgttcttaatcaatggtattattaattttgatagatccgtacaaaaatggttgtcgtcgtggtattctattattgatctcttttcttatccagtcatcatgatattgccattttgtaagtatgtatacatccgcgcttttaaccccttcaaaggagcttaccttatttataacagaatccaccgtgaatatgttttcactaaagaatacgaaagtcagcctatcttctgaatcaatcacactaggactgtataaaatatttgcttgaaattctgagtacatgcgttcaagtacactccgacgatgaaattttgtagtgataatcggaatggcaaattgaatataccctaccataacagatggattgcactggattgagaaatccaatattcttgcatccttcatcctaataagacgtcttgttgtggttttttcagaaataccaacttccttagcaatatctgctatttctgtccttgcccctaataacagtaaacattttattattctgaaatctgtttcgcttatatcgattgattcaacatgtcgttctaaaatgctaatactcacaacggttgcaggttttaagagatgattcaatgattggatggttttatcatctaatgacttttcgatgattagcgctgcaacacatgttcttcccatatgatatacatgatatgcaaggtaaccaagttgctttacctgtcgaatagcatcatctttatttattccattactagtttttaaaagtacaatagctaccttgaatccaaaagttgtaggattaactctaactacaaatttttcgatgactccgtgaagtaccatcttcttgactcgtgcctttacactctttgatgttaagtcaacttctgaacctatgctgctataagaagatctgcagttcctagctaatgtggaaagaatggttagatcagttttatcaagaactaatatctcttcaacctcagtcatgatttaattgttgcaataactagtaattaagttgtccgatatagggagttttgcttcccctaaagataagtatctgtacaagtatattgtatatatgacaaagtttgaaataacaaatgaaaatgttgaacaaagcttttcttcaaatatgaggcgaaacaataaaacactgaatgctgaatctaaaggaaccataactattgaagaaacgcatggagcagtaaagtttgaacgtcgactttctaatccaaaagaggcggtctggaaagcaattacagatccaaaagaaatattcaggtggttgcccgattataaaggaaccttcgacgggtacaatggtggtgcgattgatcttgtcaatacctatcaggatcacacgtaactggagatatgctggtctgggatcttcacaatgtttttgagtatgagtggcatatcgctcctaatcaaatgttccctaatggagaacctgaatctgttatacggtgggagctcaagcaggatgacgattcaaacacggacacactacttatactaactcacagccgcctcaccaaatcaacagctctaagtttagcccctggttggcatgcgtacctagatcggcttgaagccattctaaataatcaggtaccaccagattgggctcgtcggttcgcagaggtcaaaaaattgtattcctcatgatgaggctgtcatatattaagtagcagccggactgtataaaaaaataaactttatggtttgagtatcctgccaccagagttatactgttattggtattaaaacctcaccaccgcagggaacttaatccccatggactagctgagtaataggatcgttatacctgatcaacgttaacgaatatcgtcatcaaggagtgatgtggatacagtcaaaatttctctaatcataaacaatattcaaaccatatctaatgaagataatcgaatttcggttaataaattttacgaccccgtattttttttcatgatggtcaaactcttatagtcctttctccttgtttcaccatagtattattttgttcttttcgtttccaaaatgatgggtagagaggaaatagaaaatactgactctactataataaggcattgatagaataatgaaatatcgaataaataattaatagtaatttctcattaattagacataatcttggaagtacatcagatttgaatgaaatcattacgtttggcatttttttgttggtttacttcctaatgattgctaggataaggctaaataatcttccattctggataataatgtcaattggaactattcttgttttaggatttggaataattcctatagaatccgctttagaatcaattaattttcaagtcataatgtttctttttggaatgtttagtattacttctgctctcgaaagatctggtgtacttaattacgtagttggaacagttttactcaaaatcaaaaaggtggatcatattattatagtaattgtattcatgtcagggtttttagcagctttcgtggtaaacgatacagcagcgattcttctaattccatttgctatatcaatttctaaccagttacgaattaaaccatcaattgtattgatttctattgctattgggataaatattgggagtacgatgacacctattggaagtcctcaaaacctacttattgctagtcagagcggtatgactttaccttttataacatttctttcaatattggggccacctacgatcataaatctattcttaagtggtttagttttgcacctttattataagagatctttagttacaagatctcctttagatgagaaatccacaaaaaatgatgataaaggtgccaataatgaacttcaatatagctctgttgaaatttcaaataagttaaaaccaatccaattttcatttaccaataggtttgccaaaatttctgtattagttttcttatttactatcggatctatgatactatcagaggtaacacatcttttatttgggattcatgtggatatcggaataatatcgcttatcggtgcagctatattatacatattgtgtaaagaaagaatttctatattgagagatgtaaattattctgtcttagtcttttttgttgccatgttcattttcacgtctgcattatggacatcgggactaattcccataatgatggattattttcctccacttaacccgaataatacttattatgagactgatgacatgcttcataataacgcaattatttctgtaataagtataactatgagtcaaatactaagcaatgtaccgttcgtcgtcatctacaatcattatatgattgagaatggatttgataaagatgatgtatctgcttggctaatgttagcttcagcaagtaccattgctggcaatcttactatatttggagctgcgagtaacatcatcataatgcaaactgctgagtctagagggttgaaggtgttcacctttatagaattcttcaaaatagggtcactaataacggtactaaatgtttttgtttattatttatttttggctttttatattttttacaggttttagaataatgtatattattctttgactaatctggatgtaagagaatctataaaggactgatatgttgattaagaggatcttccctcaacaaaggtataaccctactactgcagggaacttaatccccattggtcctatataataagggtgctataaaaagaatggtacaaattttgaaatatatttacgatgatgttttttctaaaagaaattctgcagatctctttaatgcctttatttgattattatatttggtaaagccgtgcccttcgtcttcaaaaatcatgtattctatatccattcccttttctcttagtctttcaactatctgatcagattcgcttttaactactcggggatcatttgctccttgtatcaccaacaaactagtcaatggattggtatcatctacaaaagtaataggagacctctccttaagaaaaatttcttctttgtctggatcccctactagctcaatagtgagacttttccaatgttcaggtactgtcttgataaatgttacaagattgcttggaccaacaatgtccaccgcagctcttaaactatactgaggtaggcgagttatacaacttaatgctgcaaatcccccaaagctagcaccaaatagccctatccttttaggatcaatccaatcctgagagatgagccattttattgcatattctaggtcctttagttcattaccaccccagtcatgatatatttttctttcaaaacttttgccatacccagtacttcctctaaaattgggtgcaatcactgtcaatccattataagaaagatattgataaagcccagaataatcatagtatggtctttcttgagctgttggaccaccatgaattgacaagatagcaccaaattttagcttatccttttcatttatttttttgaaattagtgttattaggaacatatattaatgcagaaatctctaatccatcaaaacttttgtattttattaattgtggcttgactagtttatcatcagataaattaccatataaggatgtagtaacgcgcgtacaattattattatcgtcattcttcttgagatctatcaaataaatattggttggagatgtaggcatatccatcatgatgccgattctttttccatttgaagataatttgagatcttcaataacgccgttcaaaggaacaatcttattatttttcttaatggttggagtaatttccgtaatttcttgattcaccatgtctctcttgtacaatttactataaccatccacattttctgtccacaaaagcagttttccatctaaactaatatcaattgattctatgtcatgaggagaagttaatatccattccagttttgaagtatcaatattgtagaatgcaagacccatgaactctctttttgaatcagatagaatgtaaaagccgttttgattaacagaccagggtccaacaatgaatttgcttttttgttcatactctaaattaattttttccatacttctactttctacatcgagaatccatatggcataatcagttaaagttattaattgagaacagtttaattttttattattgggagaccagtagcctggaatataccaacctaccctatctgtaatacaaaaatctttgttttcactgctcatgttccttacatatataagcatatcagaaggattctttcgattcgatccataagtaatgtattttccatcatgactgaaacattgcgaaccccattcatgtcttatcgttggatcagaggttatgggttcaagccaggaattgaaaatatcttcaattctatatatctggaaattttcatccccttgatgatctgcaaaaaagattaaactattatctaccggagaagaaaaaaaatgtcttattgaatgatcgataaaattagttaatggataaggaaagcattgtacctcagaagtcaaattagagttatgtctccataagttaaactgtccattgatgtctgaaatatacattatccaatcattatcttttttgaggaagtcaaaatcagtgtatctattagttgatgcaaatctttcaaatggaaattgttgggtaggtttattctgcttactgataatggaatctaccatctttctattttgaatatcatggataatagatatgtatttagtatttagtaagctatttgatgttcgaacgcgatcaatattctttgattgtaatcaatttaccttttcatacacagttaatttgtttgaaaattatcaagtttttcaaaatattgtattgttcaaaaacttattctggtaaaaatttacaattagttaatgattattatggatgaaaagaagatacacattagaactttatgtcatattattgtgaatttattttcactttattcaagccgtttaaggatatctgttactacgtactatccagaattttaaaaatttgcgagtaaccaagtggacggattaaacaattccaaatcctagtgatacgattaatatgctagcgatagagtaattatatattggattgtcataagtttactgtttggtgtttttctggaagaattaagaaatttggtggtaaactttcactttatgaaaatgatgaaggtaccttgattttaaacggagatacttttcttctggttgaatttgccgaatacaaaaaatttctaaatgaaaatccgtcaaagaattatgtttgtttatggggaactacatcgagtatttcatctaatgatgttataactatcgaaggttatgaaaatcatagacacattgatgattacattaccattaatattacagtacaaaattatttaccgggatgtcatgcatcaagttttgcaaaaaggatttagtcaatcataattccggtttatctataaagagttgaagtatatctttctactattgatttggaaatccaatttaaaacaccgataccagcactaatcctcaaaggccgagattaaccacatacactcaaatccgagaacacggtcaattattatagcctacgaaaaaagaattgccatttgatgaggcgactaggcatgatactcctaaattttttacgactgtcatcatatgttatttatttaggatagaaaactctcaattattgttagaattttactggtttgtaaaacaaaaatcttttaagacattgaatagattgatttttatctaaatataaaagatagggcaggttaacttgtaaaagaactaacgatataaggtcaaacagaggattatgttacttggtgtgttatatacaaaattgatttgaataaaattactcattaagatatctaaatattctacaagattcgctagttatgttagaatacccataaatatctgatgcaactgatcctttgttttagataccttttactaatctttcaaggatttcatggggttactttgatattatatccgcttttgtatcgataaggtttgttggtgtttcctactcaaaattaataattatttggtcattagattcatcattattctaatcgtatgtgaaaacgccttttaaatgatcttagcgaaacttataaatactctatttactagaatggatattgaatggtttatgaaatattctgtcatgtagtaatctgattagggatatgatgggtaggtgtcgttttattgtctgttatctttctgtttttgataattattttgtctaatctgttttttaataataatgcaattgggcagactctggagagtattaatgaaaaatatcatatgaccaatccccggctagaagtaggaatagagccaaatgaggtaaaagtcgataaatttttaaataaagtatatgtggctaacgaacgttctaattctatatcaattttagacaacaatttgggaaccctgaaagaaatttttattaatacaatacctcacgatgaggaagtaaatgacaaaatacatcatgtatatatttcaggtaaatccccttcagaaactatatctataattgacggaagaaccgatgagttactacgaaatatacctttgaatcaagagccgaccgatattgaagtcaatgaaaaagaaagtaagttgtatattgcaggaaaagatggtataaggttgattgatgataacggttccaatccacttaatatcaactcagttaataaatatgatatagaggcaaacttttccaaaatagcggtagatgaagacgcagaaaaagtttacgtacttaatgaagatccaccagaactattcatttttgatgatgatttgaagtttttggaaaaattatccattccagataaaaaagagccgaccgatattgaaatcaatgaaaatgaccattctgtatatataattactgagaagaatttttacaaacagtataatgatactcaaatgacgggtattgagttaaataacaaacctcgtactttagaggttaatgagaacgataacatgatatatgtaatttctgataacgatgtttcaattataaatggaactacgaatactaaaattgataagataattcctttgttagggccgctcttagaattagaagtcaatgagaataccaatacggtatatgtactagcagaacacggcctgtactctctgaacgaaaaaacaaaaagattttctaatatcaacatgtctgaaccactctcgaatattgaagtagatgagaacagtaacattatttatttgacatctgaggattctgatagcttgttcgcaatccatggtcctaaaaacaaagttgctgtgggaattacatttaatacatttcccttaaactctggaaggattttatgtggtgatgataaaactgaatatccaataaatcaatacttgtatgaagtaccgggtataacctgtatagcgaaggcaaatagtggctatgagtttgtaggctggaatgagaatattgattcaaatactactagaccgctgagacaatgtatagaagaatcttacaatttttatgatccagtcatagaaccaatacaaaaaactttgaatatttacaacgacactgcggatacgtctttttgcctaacccaatatggtacctttactgcaagttttaaggaattgcctgctcccctacctactgaatactggattcctctgtatggcctaattgtttcgacgatcattggtgcttctattccaagtattataggatggactaaaacaagaggagacataaaaaaattaaatcttcaccatgagaaaataaagtcactatatgaagagggtagtcgagatgaccatgattttgaatcactgaataaactgaaagatgaaatctctgattcattttcaaaaggtaagataagccaatttcactattcgaatttgaaagacgaaatatccatactatatcaggagatatttatgaaaaaaatcgattctatggacgatgataaagaagtagatctttcattaaagttaaagcttgtaagagagattaaggatgctttttcaaaaggcaaattaaccgaacttcattataatttgcttatgaataaaatttcagagatggaaaaatagaatgcatcatctaatttattttaattatttatgaaatcttaacttgaacttttcatagtatttgttttcccccttttacgtatcagacccaaaccctcttaagttcgatttgaaaatttagttattttttatcttaacacaaaacaaaattacgctcaaaataagtttattgtaatgccccctgggctagcttatgaaaaataattattttagaaatatgttatcattaaggtattagaaccctactgccacttatgatatttgcggaagtactgacggagtactatcgcttatcaaaagttttggtacaatggaattaaaatacaaacgtgcagattgtattattaaggaggtttgggaaaatacagtaaacaagagaaattaaaaaatataattttttatttagataaattaaagcttctaaaatcagctcatcagtgtcagcagtaacgtattttgtatctaggatctgatcatcattttcataattattaagttgaaaaaataaattttctaattgtgctagacctactttcctaaaagattcttttgcagactgatataactagagttaagttctttgtgacaataagagcatcttgtcaatcaaattattattaaaggagttctatcaaaactttagcaataagtgcgttagttgttgtcagaggaaaatatgtagcgttggatctttaaatagggtctcataaatagctaataccgatgacgcatctgaggataatggtaaaaaatgatgtagactgtgctcaattgtacgcctacttaggctctctgaaagactattccaatagaacaaggattgaaactttctggccacgtcatcaggggcgactttgatgagaacgctctgaaagactattccaatagaacaaggattgaaacttgatatatttaatggtgatatacaaaaggagcagatgaaatgaataaaatgaagagactaaaagaagtagatggtgctatctggtttgtcatatttctctatattggattattttcaatagcattatcattggtaaaattagggatatgggattagaaaatggataataacgaaccatgcgctatgaaagactattccaatagaacaaggattgaaacggaccgccccctcattttatcttccatatgctctacagggttagtacgcgtagatatatgataacaactcaatttataactcaaattaccaaaataagaagtaggatgtgtgccaaaactgctgtccctttatgccatactgaaattaagcccaccgagtctatgttttttgatgatatgctcacctatatcatgataattgatcaattatcaaaatcataggatacctgttttaaaattagaaggatttcattcttttttaaataacatcccaccgggcctggttgaaatctgttcatcttcagtttgaggattctttactatcatattatccatattttgtttaaattgtgaagaagccttgtcattgagcttaagcatagcttcttcgtaacttttatttaagcgtccaaattgttattgcttgcaatgagagtcatgaatatatcaattataaaaagattttaagcctaatgtaaagaatcctcaaatgtacgagtaaattagaaattcatgtaatctaataatattaaaaatatctaagtgcgaagagagaatatattacttattgatagatttctgtgctttgttgattatcgattccacatgtgaaggtagattcacttcgtgaatttcctttttaattttgcgcttactcatcaaatattggtgggcaaattcgggagtaattgatttgacattagaaaaatcaattataatatcatctgaaggggtatactcaacctctttttcaacaaaagtcatcgcactttttttaatatctaaatccgctgaaacaaaatctctaatggaaacaacatgaatagcactcatggctgtcatatcagtttagaattctccttctctaaatttgtctatttctatcaattgtatttgatgattgctatctatcagttttagctatcattagtgctctttcgcattactcaacatatttggcttagattttggtctacattttcaatagtttgaccggcctttttgtaaccactcattggttcgaagaggcgagatcctcttctcctatgatttccttgatagttgggggttcagagatagaaagagatcaaattactttttgtattgaaacaaaaaataactaattaattttacccagatttaattttatgaaaatagtgacacaggaatttcaacatagtatttacatgtattacgctgcgtaacatatattaacatgttataacatataattgtatgataaaatcaaaaaaaataataaaattgcccatcgttaatacaacaaagccaatccgaaaaatcttcaaacgtttatcaactagaacggaaattgtctaaaataactttacggagatgtaaaaagttaatttgcgagcatactattatcgagagaacaatcacaatgtagataataattttgtactgcctttgatgaatttaatgacataaacaggaaattatttgaagtacctgagattgataaactcttatctttttcagataagaaaaacatttgtatccaaaatcaatcccatcaaagcagcaattttttaaatcgtgttattgcaagaatttgcattgattatcattcatctaaaacaagtgataaagataataaagttgaaaagaaaagaaccattctaatagatgcaggaagcggtaataatctaggatgtttctatatcaatttagttaatcaagcaataaagaaagaaatagacattaacagcatccttgatgggattatcattagtagagccttcacattttcccaattggctaatatgttaatttatgaacttcccaagatggtgagagaaataggtaacaagttacagatcattatactggacttgttcgatacattggtttcttcgaatgtaaaaagcagaatgaaaaaatttgaaaataatggttattcagaaacatcaagaaatgctattcaagtgaatataagaatagtccatgaaatgattgacgttttgattggtctttcagtaaaatatttcgtaattctaacttgcgaggattgtgaaaatattaaggacaatcctatagcattcaaattcaataacgctataaacataaagtactctacggataagaataaaaataagaacgaacagatttttaaaatagaacaaataacaggccggaacaacagatctataaatagcgtgaataccgaacaattggcacatctagacagggataaaagcttaagcttctcaccaacaagattagttaatttgagtggagcctgatggatcgttctgtctcctcattcagaatgttgatagacattgaaagatcataatggatagattttagaaaagagctctgtaaagaagacaaacaacgatttgatggattgttttcagtccccaaactatatcatcatgcgtcatccaattcatctaatataacaacaattgaaccaattattctcaatctcattttcaacaatttcaagatagttcatggcacacagactacatctgtacaagtcgaaaacaacagtatcaatggaggttttcaaatctgtcagtcaagcaaagaatcagaaattgaaatacaaattggatttaacaaaataatacaagattggaataaattcattcccatgggatatagtaggacatcatcatgcacattcgtgttcaattgaacaggatgtagttcacaattgtaatcagtggttgacttaatctaatacaatgcgttaaaatgagatgtgagactgatggttagtgggctcgactcgctatgatatgatttatgttaacaaagatatagaataacctcctaaataagttatttgtgttattgatcaatcgaccatttgtcattcgtcggatagctttttacaatcctatcaaattgatccaatcctagtggtttcttaaggatttctctgactccaacatctatatagtcagcgatatcatctatcttcaaattggagccagttaatattattatgcatttatgtcgcacaccttgttttttcaattgtcttaatatatcaaatcctgtgtaaaatggcatttcaatatccaaaaatattagatcataatgctgattttgaatctcaaacaatcccttttgaccatcattgacctccttacaatcaatttccatccccgtacaataccccgccaataagcgagtgatgtcggtgttgtcatcaattgtcagtaatttcaatgataatcatactattgatcaaacttataaatattgagtgaaattgcaatatttaagaaaatattgaattcatgaattctattaatattcgaatataatttttgagcaaccaagaattatggataataaggattaattaccctaatactcaaaattcttcaaatttgtagaggtcgattctacatattgtcgcattccttccatatcttcagttagaggttggaaagaattgatcagagaaggagattgttcctttttatctctgacagagaaaaaagagggtgtatgcaaggacttctccaaatagaacattatttcttaccgccgatccccgtgggttatgatattaatagattaaactttttaccctatttgatagacccttattaagacagctgatataatcgtacgttaaactagatttctattgaattgttagaaatatatcttctcttgtctccatataagaaataccaaagagtaatctatgccttactttaagagcatgcaatggcttgcaatggtataaactaccatgatttaccatgcctacatatattattatttactaggatcttttttcttttatcttattatatatccctaattagctgataccaacttagctcacaattccacttgatagaatatgtattaggcttccaattgtagtgatatacagagataggaaactacattgatttttcttcattagatactctacatctttaagcattcataattctgtttgtaacatctattgatcctgcctgcctgcaaattaagttctatcggattaaacacaagaatcagcaacgagttctaggctttattatataattaatatcctgttcgattttgtatcggaatttgaatgaaacaaaaaaccttataagcattgtaatttttgttactattcatggtagagtcagcctttgaaaatcctcacaataattttttcaataaattcctaaacctagatcataaattaaatacacaagacaaagaaatttacctaatttttagagagagaatgtcattgtatgagaagacatacgctgcatccttaatgaaaaaaatcaaatactcgatgattataacttttctcttcattattgtgacagcagggctgtcacaattggatcagtttaaaatatcctcttattatgttcttggggctcctcaaccaaaagagaatgtaaccattacagccctttttaaccaaatgggcaaagcagatatggtgaaggaactattggttgatgctatcaataaattaaaaatcaatcagcctgaccttgacatcaatctaaagtatatcgaacttcatgatctgactcataatgctactaaagatgaaatgttgaagacaatatcaaatggtactcatatcgatatcatatcattagaccagatttggcttggagagtttgccggaaagggattattaacagatcttactaattatactgaaaaatgggggaggatctctgattggtatcaatcaaactgggctggtggtatctataaaggcaaaccttatggtatttggtatgaaactgacgtgaggggaatatggtattggaaggacctattaaaacaagctaacattgagccctctatgctaatgacgtgggagggatatattgacgctgctaaaaagcttaatacagcactaagaccgcagggaacggaaggagttcacctcacaggggctagtcattctcctgacctatggtatccctacttatgggagcttggaggagaaataattaaacaaaagagtggccacccaactaaaggtgcgtattggtttccagcttacaatggttcagcaggggttaaagccatggaatttatcaaaactcaggttgattcagatattataccacagaaaaaacatttctttggagatgaatttgctaacaggaaatttgcagtaatgattgaaggattcttggatgcccagtaaatggtccaatttaacaggacaacagattgaaaatataggatttattccaatgtttccagtgcctgataataaaactaagaactctacattgatgggtggatgggtgattagcattccggtaacttcttccaataagaatgtagcatgggaaataattgaacaattgttagagccagaaattttatctccttggctagctaagcaaggattcctaccaacacaggtaacactggggcaaggtacaacctcctattcggatcacttaagaaaatctattccattctatgacgatatgatttcaatcattcctactggaggaagcagacctaatattccagagtatcaagatattgctgaacatataagacaagcattagaggaggttttctatgatacaaaagaacctaaacaagcgcttgatgatgctgcagtaaagtcggcaaaggctctaggatggtaaaagtattgtaaagaatacaaaggaagatcaatcacaggatcctgttaacttaactataaatctatagcttaaagatgctttatttctgttatgttgagtaaaagaaagagaacatcttcagagcatatttaccatggtctttatttgtactttcttggtttatcgctcagaaattctgtcaaagcattatcctttttacatgttatcaatagaagtcacgttgcaatttggaattggattcaaaggtataaacctcgaaaggtttcaacaagaagaacaaaaatatcagaatacctcattgatgagacattaataaaagtcggctcagaatactcctggttatgggcagcaatcgaatcagaaaataggcaaattctcgcactctttcttagctaataaatccaaggagaggaacatgcttatcgcagagagatttatttcaggtctgatcaagattcacggaaaacatgtcgtatcaacagacggtggaacctggtacccaatggcttgtagattcctaaaactaaaacaccatatcaattcttcgtttgagaaaagtctgattgaaagaactatgcagtacatcaaggatcgaactgaaggatttgacgattactttccatgtagtaaagagaagtgtaaactaaattatgtcaaaaactggttgaatctttttgtaaaaatacacaacaaggaagtgctaaacgcctaagttaacagcgccgatcacagtcaaataactaataaatagattctattgtggaccacattatttttgatcatagatgaacgagtagcccatccacggcggactctgcataatattattaatacccgactataactacttgcaggtacttattatggatatatttttgggaaaagaaagagagataggtatcatctcacttattttaattatcttatgctcaaatggcttattattttatatccaaaatatgactgctgcggacctaaaaaagactgtatttgaacaacaaaaagagcttcagatacaagctacaaatgatattgctcgacatataggctcagatatcaacttagttatgtcaatgctctatggtttaacaaattcgcactatatacagctaggagaattgggagacgacaaaactacaaagcttttggatgacgcttataataaacacaatcttacgatagatagcctgtttattttggacaagaacaatgttatggtaaatacgatatctacccaaccatcagaatttgttctcggcgaagatttctcatttagagactgggtaaagcagacaacaagtggccacttacccgtcttctctaatggcgattttgagagacaacagatactcagagaattcatatcttatccgatcctgaatcaagatacgggtcaatatatggggatgattgtaacatcgatacctacaataccattttttgcacactatggaaatattcaagatattagttcgaagtttttggtagtatatgataaaaacggtttcatgctagctaatggcgcaagcgagacgcttgtgggacaaaacttttttggcaattatacacaagaatttatcaatcacaataaaatcttgaacgatgcgactcggaatttattaaacggcaaatcaggtttcgcagtttatgattatggtcgtggtgaaagattaaccactcagtatcctgcatatataaacaatcaatcttcattttttattcaaatagtgactcccacgtcagaaatatattcaaagattgacaatgctctttccgaacaaagaacaggaatcgttactttatctattgttgccagtattattgctgttactatcttagtaattttactcagacgatggaatattattctaagaagagaagtaaaaaggagaacacaagagctggaagattcttataatgagatgaaacattacatggtagaagttttgaaggacctatacaaagataacaagtaaagagacaatttcaataaagactttctcaatggcctttgcataggctcagagttttataagtcaggcaagaccatttgggcaacaataactattcaactcaactattattagaatcactctttatcattattaatgacagatcatgtagaaaattcaaaaagtgtaatcttctcgggttgttttgttatccattgattttgaaaagagaaagaaaggtcggacattttctctttctattgcggatttcaaattataacatgatttaagaaaaagcatgatataaggttattcctgacattttatttaggcgagaattcagattcctgtcattccagacatttcgcctttagtatggctctgattctttctcaacaaaagcagattgattcacatctaataaaataatttttgattctgattaacaatctttaacttttggatttcagattaaattccacaaggtttattgagaactaatccgcacagatgaggaccatggtcttggcaactattaatttgatagcataagtttcgctcatactttattaacttgttaacatcgatctatttgttattcattatttagccaaatcgatgagtttggtctaaactctaatctaagtatcattattgtcaaaaaagatgaaatattcttgaataattgaataaataattatttcataattctctaatgaattaggtatatcgtttattaactttagttacgaatttcttacaatgtcctagggaaatagtattgagggctacattcatgtgataagtgtctatcgtcaaatgcaatagcttcgcaactacttgttccattgattataggcacaaaagcatgagacttgaaaactaatcatggtgttgacggcgccgcattatactgatgcctttaatacttctcaactaggattttgttattaaacatgttggtgtatgtattaatcattatgggatatctttgtctttcaaactggatgattagaaccaatcctaaccctgtaccacttggaacctaatcccaatcatgacgacttgaccagattggcatattatgattttgtaaattgtcaaataatccgaggtatcaaaaagtactgataaaaaatagttaattattaactatatggtaattcagaggataacccacttaataatgaaagtgtttcacctaaatctttaccacctgtggtccatacaattaatgtttgtgtatcacctgttccttcttgtccacctctcaagtctttaaagtcgtatgtattgtcaacagtaatccctgcacctgttatctgttggatgtagtcatcaatattttgcgtgggtaccatcaaaattcccaccgtatcaatattgctagagtttgaacttgtggatatggctgtgctagacggcgttattgatgataggatattacctactgttacagaaccagtcattgttacacctgggtcaccttctgcttcataattatacacacctggattactaaatgtaataggatttgatgcttggctatcaactatctctccagtgttaaaaaatgtagtgctaccgtcaatgtccttcacatctattgtacgttcgtgacctgcatcaccgttaaaccattgtacggtagttccagtgctaattacagcattttctggtacaaagtgttgatccaaaaatctggcttcattgtcttcaccagcagcatggtgaccttcattgggaatgaggataacaagattttttacattattgcctaacgtcattgttttggtgttaaaaatgctttctgcattaatatttggctgtacatcaacactatcagtagaatttgtttgcgcaaatacattattggagaaaacatacgagatgggtccggataaaaccaacataccagcaatagctaaaagtagatgtatattcgataaattatttttattatccattaataaaaagggagtttgaagttacataaaagctattatcattctctagaatgagaattaggccatcattccgtgttaatagtgaataagggtggataagatttgatattaaattgcattaaaacataccataataccactagggacttattccccacagatgaggacagctacccggtcatacaaatttgctcaagggataagactgcattcctacgaaattgcctcttttatagacaaaggaacatcatcggtatttccttcagacgttatgttgatcggattaagtccctgattttctagtaactgtgaaccattattggaaattataaaatttacaaacgagattgcgccgtccatattcttaacagtctttggaatagtgattgaaaagtcaactggttccccgtaaattgttttttgatcagcttgcaaagtgtaatttgcatgtttgtaaaaatcagaatatgtgggatcaccaagattgatctcgttgggtaaagtgatatagggaagatctctcgatatggcctcatgtttgtatgctatgactgcatccaatgaacccgtttctaacactgtcttaagcgtttcttcaggaaatatctgtttgggatttctatcctctccaaatattctattcttgatagatgaataattgtaataggaatttgctaattcagcggtaataattccatagtatccttttggatccaactcaggatctgttctaccaaatttgaaaccatcctgagaaacaatttcataccatggaatttcacccattcttgctttttctaaatcaccaaagtgtggactatagggcgagtaagcaatcacaatttcggctgatccaaactttaaaagccaatctactaggggaagagtagtattcattagccttgtcattggtaccgttccagcactaacaaatacatctggtgttctaaatccatccttaatcaaatttgaaacttgaacagaccccttcccttccccgacgtatggatatccagattcgctttgaaatgcaggtccaagtacatcttcaaatatctttacaagagatccagcgtacatcacaaagactttatcttgattaccgccagttacacttccttttgcacttgaaaattcacctagtaaatgtactgaatatagtccgatgataacaaagagtatcaagaataaaccattctgcttcttgttaatcactaaataattaatcacaatataaaacataagaaccctgctaccacagggaacttaatcctcatggatgagaactagtagaattatctatgagtagctatggatagtttaacgatatactgtgaaggtggtccacatccgggtggacttgtggtcccaggataagttttttctgtaatgtgttctccgttaagggcagttgaatttcttaaaaattcagatgacagaggtatctcatctatgaataccaaaccgttgcatcctcctggaattaatcctggagataaggacctaatgacgtttgtcgcctgaaccagatcagaaatattgtatgatggttccattagttgaataagagtatctctaaggttgattaatgtaaatgatgttgtactgtctgccttatttagtcccaaaatttctactttaagggaatcgttttcattattaaatgtaaatggaccaattcttaggtttgttgttatgtttgcaccatctcctctagatcccaagtatttagttgcggtcaaaggattgtcattattcttttgaccgcttataccaacgtataaaatatcggaagtaggagcacgtgcttcattgatcaataaattttccattgacacataaattgttaatggaccatgaagaatgggatcatatttggccagtatagttgccggataaacgttgcttgatcctgatgttgatggaattttagtcaaagttatattattatttgagtcgttcatcaaaatattaaaatcaacattcccactgttagtattatttgataatggagaatctatccattttccagttatcttgctaatgttattttctaacgttccactaaaaatgtttgcaatggtgctggactcaacatttggagctgtccctaatatccaaactgtattatttgtttgtttaacatgataaatagcctgcttgtctgacaagtaaataccactgatgtccttactattgttagttggcgattgtgcatctgcacaaattacaaaaatcatacaggaaattgaaaagaaaataagcatggagcaatagataataccttttcgcatattttatgatctttatatattcccttatgtaggatttaaagttaaatcgtaaggtacagggaaaatcagtaagagaaaatatattacataaaaatgacctaatccggataatgtgaatgttaaatattcttatattcatcatcaaattcaatttgttttgcatttgcaatttgatttgatcggcttagagcatattttatatcagattagatcaaattaagaaagtaattgtcgtaactgtaattatgtaagaagaaaaagaaagaaaaccggcccatccgtgaattgctaattcataagagaactgcgttgcatgaccgaattgaggttctaatcaaattacattatcgagaccgcatctaaaaaaataagtcaacaatagatattttaataagtgttctcctacaggttcccaactggatccagaagcgatccagctatggaagtttagatgcaatgatatctatcttctcaatagatggggggcttgcaagtagatccgaagatttttccattagggcagcagcaatttgtcctgaaagatgagcttgtcgatcagattcgtctggaaaaacatcaaatattccaaaagtggatggtcctagtcgaattgcaaaccatgccacagtatctggctcttcctgaactattggtaatccatctttgaggaaccgttctacttcatcttctttgcctagttttgcttccaatttaacataaagccctactttaaccatggtatttgtccctcttagtaaaacaatatcctaaattttgtttcctcattttagaatcaatgtgaaaaaagtatttaaggtttagtcttttgaacatgatttagatctagtgtcaaatactatgttcaaaaagaaaagaaagtattgacaataatcaaaagttgaaaaggtaagacacagtttgataccatcttgaattgtctaatgttttatcgacaatattttaattatgatatttggaaaatatcggcctagtgtatgatagaacattgatgccgctaggaactttgatcccatgggcctacttcatgactgaatttttttaggtccaatgtgaaggacataatataagtataataaaatgcgatcaataccttagaataagatttacatgaaaattgttatatgataaagcgtacttttgattcaattatactttataacctctgcctccagtctatattctctagaattgatacttgtactactaggattgatttgcattattgtaaaatagagattatttaacgagtttttaaatactgatgacgtggtgtgatatggtaaatacaaagcataatttagataaagatatgtcttttcaatacaaatcaaatcaaacttcataattgaatcaaaggatttcgttagaaataccatattggttaaacatagttaacttggttcctatgaataatttgtttatatgttccgatatcataatgtattaatcataatgacaaaaaataatggaaatacatacaattatcatttaattgccgcagtatctttaggtttaggaatagtcagtatactcttgttatcttcaaatcatttagactatgcatacagtgaatcatcttatttcataaaaagtaaacttaatggcatggttcttgatattccaggatcagatccacgtcccggtgcctttatacaaacttggacacaaaataatggtttgggtcaacagtggacaattactggtgatggatttataaagagtaaacttaatggcatggttcttgaaattcgaggatcagatccacgtcccggtgcttatatacaaacttggacacaaaataatggtttgggtcaacagtggacaattactggtgatggatttataaagagtaaacttaatggcatggttcttgaaattcgaggatcaaaccctcttcccggtgcttttatacaaacttggacacaaaataatggtttgggtcaacagtggactttagaaaaacttcccgaaagtacatctgataactcattcaatgttaccaattgaatcaagccgggtcatgtaattgtaacactgtaattatctattttatggtcaagggaggaggggtttttttagcataatgtccacaatagaaatactaattgtaattcatccaatcattcttaggagatagactgcagcagtaacaaattggtatgttgatacgttgacaagtcataatactatgtaacgaagtttgttactcattcagactcattattatgaatgggttttgaatggtttcttatcacttctttcagagttccttttacttctttgacattttgtttatatagtatcatttttccatcttccttggtacaatagatattaacacgccacgcatcgttatcgatagttggaaaatcagaacgaaagtgcgcacctctgctttcttttcgtataaaggcactctttattatcgcctcacatacaatcaaagatgacctgacttccaaagttataatgagattcctgatgtggttatcattatttaattcatttttcggtagtatccgaatctgagaataaaacctatcctttaaagttagaattttatctaaccctttttgaagatttgatgcactccttactattcctgcaacttgattcattagatcttgtatttctttgcgaaaacttaatggctcatccaataccacaaaaagaatctttttcaaacttttgtatatccatatctacttccgactctagtgaagtttcttcaagtggggtttgtacctgctttgcaaaaatcgaggcttccctccccgccatttttccaaaaaccaatgtatcaagtagactgttaccacctagcctattggcaccatgaatctgacttattgcttcgccagctgcgaataaaccctcaacttttgttttgcaatttatatctactaataatccgcccatagaataatgtgcagtaggaccaacttccattttctccttagaaatatcgactccggctatatccttaaattgtttatacatggtgggcaatctatctaatatttttttcaagggaagatgagtgacatctaaccaaactcctttatggacagtacctctaccttctgcgatctcgttataaatggctcgtgcaactttatctctaggacctagttccatcctttcgggataatattttttcataaatcgttcattatttgaattcagtaaaatgcctccttctcctcggatagcttcagtagcaagcgtacctaatgcattttcaggccataccataccagtagggtgaaattgaaccatttccatatctactaaatctactcctgcttcatatgccagctcaattccttcaccatagtgttcataatttctcgaactgcttatagaatatactcttgtatatcctcctgaagcaagtattaaagatttacaattaaatttcacaagttgtttttccttgatgtcaatgccaattgctcctattattttggatggtgaagaatttgagtatccatctacattttctatgttatcttttagtagcaactttgtaatatagatattatctatgatatcgatctttctctcattaacctgtttcatcaggacacggactatctcattgccagtccaatcttcataaaaaacagttcttctgtaagtatgagctccaaagaaacgttgtgttagtctcccatcttgctccctatgaaatctagcgccccagttaactaattcacggatagcatcaggagcactcttgcaaagaacttcaactctctcataatcagcaatatgttcgccttctattaaggtatcagaagcatgtattatccagttatctttggggtccatgtttccaagtgcagcattgattcctcctcttgcaagcaccgtatgaggatcaccttgtttgctcttgctaattagaagaacaactgatccattgtcgtgagcctcaattgcagctcttagaccggcagaaccaccaccaataactatgacatcataagaataattagtctgactgtgattattttcagtcataattatgttttatggtaaagatatttaacaaatattatgaattgaatacaaactatattcaatgattggtagcaaaagtttttaaatatgatatcgttgatttaggttaaaactttagataacaaaatagaaaacgtaatcctttaatctatgaggataaagttcttctagaaaattcatctgagataaattaatcaaatacatttcttaactatattatagtcttaaacaataattcattatcatttagattacttatcttaaccaattaatttgaattaattgagccttaaaatatttaaggctcagctagaaaagagttatttcatacttacttcataaaaagagaaaatatttgcttctttactgcttcacttttattattcatatttccactacctattctaggtttaagttcaggactaaaaccaaatcatccttttttgttacctagttatatgtttcatagtctaaaacgatgatcctttattgctcagattctgataggttttaagaagtttagttattccttgatccggtttcttcaccagatctgctggttgaacatctccagattttgcaggtacttgtttgcaattgtatttctgccctgtttgaaggtctgcatcacattcaaggcattttggattgttatctgtaccatcacagcatatctctttatttttatcactgtcatatacgcaactgaaaaggggttttccgccggggtttgctgcgtatacctcactttgaactgaagcatcagacatgattatgaccaaaaaactgttataccagcgttcatgaaaatttttgaatttatcttgtagaacttaatcatgcatcgacttatagccaaaaaatatgaaccccttcatttaatttcaacattcgtattaagctaaggcaaataaaaataggaaaggtaaatgcgaaaagtatggaatgacaatggttggtatatgtatgtgtgtatgtgtgtatgtgtgtatgtgtatgttatgtgttgtgacctttcttcctctaataatctggagagatacttccttttatgatattgtcaaggaaggtgttaaagaaaataaaaaatagtaaaggtaacgccagtcaactatgatataaggaataaattgcaaaagaaaaatacttgaacaaaaaaataatgtttattttttatctcccgaataatctgtcacaagtatccttacccatcatctctacacattgatcatagatgcccccatcatcaccaaaatcgttgaacggattgaaaggttggaatggagagggatttccagggatttgtggtgaaggagaagaaggaggtagaggtatggtattttttatccaatcttgttgtgattccttctttaatacaaccgggatattcagtgtgctgttatctcgataaatagtgagctgcacactatctcctatctgttttgtagaaagtgcattctttatgtcttctaccgatcctatagtggtattatcgattcccattattatgtctcctccaagctctacttggtttccatcaatatttgaggcaatatacccacccttaaccccggcgctttctgctgaaccattcctaagaacatcaattactaagaatcctttccctccattagtaatattagaaggtacgttcatttgtgaggctatttcaggtgtaacattaataccattaataccaagggcgggcctgtcttcttgtgtgtcttgtataatttcgctgcctaaaaccgtagatttaggtctgtccgccaaggttaaatctgttttttctatctgtccatttcttacaattgaaagagtaacattttctccgaccttcttttctttatctagataagatagtaaatcatctatttttctaatgggtttatcatcaattccaactattacatcccctccaagttctacatctcttccgtctattttcgttaatattgatcctccatgtataccagccttatccgcaggactatcagcagtaacctgaataacaagaaatcccgtagtattctgaaggttcatgatatctgcaatatctgcatctatgtctgttccagatattcctaaataggggtgttgatattcccctgtagtaataagggaaggcactatcttttgtattaaataagaaggaattgcaaaacctactcccgagtacacgccagtattagagaaaatagcagtattgatacctattacttcaccatccatatttagtagcggtccaccggaatttccaggatttattgcagcatctgtttgtataatgtttggaattgaaaaagcaggagagtcttcaataagaggtatttgatcaatttcaggaggtaaagctggaagtaatcttcccaagccacttactattccttcagtaatagaagccgacaatccgaatggattaccaacagcagcaaccctttctcctacactcacttcagaaaagttgcctacctgtaaaggtattagcttctcactcacttgggtattattttctaatgggatctttaaaacggctatctcagcataagggtccacacctacaactttagctttatatgtggatccatcagtcaacgttacgtcaaactctttactgatattgtctccagccacgacgtggtaattcgtaactatgtgtccttccttatcatatacaaaacccgaaccaagcctagactttcccggtatatctgatttttgcgttacttggactacagactggtccactttatcatacagtttgattaaatcgtctcctgtaggtttaccagaactattacttgacgatagggtatcattattcatatttgcatttgtaaaattgtcatcagtattaggcatagatggcgatgcttgttgagcaaaagcactaacaaagatctgactgcttgtaaccatcgtatcaattgtatttggtattaaatagaagcctaaagataatgctacaattatggcagaaaaaaatagaaaccttctcttatcattctttaatttatctaatagcatatagatgtcttaatgtcaattatcatatttaaaaagtacatgtttaacttactggtctactttattgaatacatagatcgaagattatataaaagcgataaattgggaatactagtttagtgtataaattatcgtttgacttatgcttgtgtaaaaatatagaattattctttactttatcattgaatttgaacaaaagtcaaaaaactacttagtttttaggtgataaaaatgactatttaaaaattatctaacatatcattatttcaattatgatagaaatatgattcccaattgtcattgatattgatatataattattgtttctccggttatcaaaatttgttaattattataaattatagagtttagttccagcaatgattatttaacatatcatttcattaaatacatcaaaatgttgggagacaaaaaccttacggtaaatattgctgttaaggatctgagtatagccaaaaaattttacgaagaagtaatagatctaaaacaggttggatctgaaggattgagctcgataatgttcaggagcggtaccactgaccttctcatttatcaatctcaatatgctggaaccaatcaggccacggcagtaacttggtatgtaggtgaaaacataggagatattgtacaaacacttaaagctaagagtgtaaccttcgagcactatgatcgtcagaacgtaacaatagaaggggatattcatattgatggtaagatgaaacttgcatggtttaaagatcctgatggtaatatcctaagtattgtcaatgaacgataacacataaacatgtgcgtggggatgggcgtgaagaaaaagttctacttaataatacaccttaataataagaactactataatcatgagccaaattaccactaggaactctatctctaaggataagatctgttactaataggtaaaacgctatattttaatcaatatataaaacataactagactagttccatatgctatagattctacttcgggattaacaaacaataattacttgaaaaattcaagtatttgctttataagaaagtttggtctctcttcagagataaaatgtgtgtatattagcttaattcaactcgacctcctttttttgaatcagtcattgtcttatcgtattgtatatatcttaattctataaagtcacatgttactatagatagagaatgagtttaatcttgaatcacatccacatgatttaattgtgatgttggtaaagaagaaaattccattatctatcaatttatctccactggaacaactttctgcctattatcgtttttttcttacaaagcaatatgcatttcaactatacatttgatcccgtgtatacttattaggcgcccttgatgtcttattattcatgactaatcctagcttgcaagaatgttttgagtttgtcaatgaaattcggcaaagggaacacaggatcttctaaatgagaattgtgagggagtacagatgaacaataacaaagaggtaatgagaaaattaagactacaggtgcaaatttcagttgatggttgtatcgcaggaccaaacaatgaaatggactggctagtctgggatgataaatacataaaatatgtaaaggatataacagaatccgttgataccattattatgggacgaaaaatggtctatggctttattccatattggacagacgttatgaacaaacccgatgatccgatgaatgcactagctaaaaaaatgattgaaattcctaaagttgtattcactaaaacactaaacaaacctaggtggataaatacagacattgcaacaggtgacctcaaagacgaaataaccaaattaaagaaccaaaatggcggggatatcatagtttacggtggtgtttctttcgattcctctttgattaaagaaaaactaattgacgaattttatttatttgttaatcccgttgtaattggaaacggaaaaactatctttaaaaacctagaggagattcaaagatttaccttgatcgaatcaagaggatttgactgtggtttagttttgctccactatgaggtaaagaaaaattaaaaccaaaaggagtgagaaaataactggaataattagttgttgttcttgtatttaatatcttgattgtcctctctatttatatttgaaaatttcagatctttcaatataatgtatgttgaaatattttaatactatgtcaaaaaacacatgaaaacttacgctgagtagtactattatacacatttaattacaatatttataattaacaaacagtcaacaaacttaaacaagctattataaatttaaccaatttatagaattattaatgaacgatgtaaaaaaaattccagatgggtatcattcaatcacacctatgttaatagtaaaagatggactaaaggcaattgaatattataaaaaagtgtttggagcaattgacaagggaaccatgatgatgccggataataaatccatagctcatgcagaattaatgataggcaattcaaaaattatgttatcagatgaatttccaaaaatgaaaagtttatcgcctactagtatagggggaagtccagtatcgttgtatctatatgtcgaagatgtggacaaaacatttaatcttgcagtagctgaaggaggaaaatcgttattcccagttcaagatcagttctatggtgatagacatggaagcatccaagatccgtttggacatatctgggcaatcgctacacacattaaggatctaacaaaagaagaaatgaaaaaggcagctgaagaagcattttcaaaaatgtcagtctaatttgattaaggaatgcagtactgataccatttaagtttgtaaatagaacctagtcctaaaaggatttgttaaacatccttgttctaaacatcaaaatggtggatatgtctaaattaatcatataatctaggtggcttacaaaaagagtttacaaaaatggtattcatataaatcattttgaatattcagtatttgaaaagtatgaataattcttgaagtatcgtatttggaccttttttagtgacaaaatatgcaacggaaaccacccggccagttgtaattttaacattatttagactcgctaaaaaagtgagagaaaatagtatttagaaaatcacaagaagaaatagaaatgaggagtactgtaacgcatattccttatatctataagaaatgagatcgcctctagcaagagatacttatttgaggcgtctaaaaattttcttaaagttaacagagccgaaaattgggacatcctaaacttcaatttgattattctatgtaatactaccgtctgcatattttagaaagaaactgtctttcgttatcttttgtcattacaatgccatattagtactaactaatagtaaatacaaatggttttgtaacgttaccaggctgcatatcctcagttaggtaataaacagtggcggtcgctggagtttttcccgccttgattgcttggtataatgtacctggaaccggaccggcaactgttacctcttctccttggtttaattcgaatggggatgaattagcggtgcagccttggagttgatcctgtcttatgactacatttgccatgaagaacgcagttaaaggtgaatcacaacggccagcaggtaatattattgtgtctggtgatttattaaccactgttgctagtagttcaaaagagttccccgtctttacatttgaaggtgaaggacgaatatctactagctctactccggtacttgttgcattcactgtggagatggtattggaagattgagagtatgcataccgatcttggtctaatgaaacaccgaggaaagtggaagtaattagtatggctactaacggtaataagacaactcgtttaaatttgccgttaattgtcgccttctcattcttcttcgagtgttgatttgtatttgtcacacattattcattcaaacctattttataacatttgctattagttttgaataccttatccaatgattataatcatcaccaaattggagaaaggctgaaaaactgattggtttggtattcaacaaaaagtccttagtatctttgattcccgttattgtttactaatcattagactataattaattcttaagtattatgagcaatcagtaatttgatagtagaataacgaatttctatagaaaaattaatgaaattgtttattcatttcctatttcttagaattaaaaaaaatcaagtaatttatactcataacacattcattactaaatccactggccagttactatacaggcttttatctagattctactaaaatatgatacacaagaaaaagtagcagaatcgttctatcaaaatattggatgcgactttaccattgcagatcggagattagatttggggttagccattcacagaattgtattatggaataaaagcataagagaacaattagtacatttggagatgagtatgttcttctcctggatctatattgatttttacgagtatcgtttgataattcttgatctgtgtagatttatagttgatgagtaaagatcagtatgaaatttactaatcaaaacttgactatggagtaggtatcggtaggcaagctcttaagacaattaatattgaagggatcacattgaaaattaacttgataatattgaagtacacatcaagatttctgtctataaatccgttaaattagtaaaatttgttactagctcccatacgccccgaatgacgtatcagaataaatctctttaaatcttctctgtgaccctttacaataaattatccgaatttccaaaaacttctttgtaagccaattcgtttaatggtttgcgatttttcctcttgcctgtaacagcctttttaggatatccaaaacccactacagcagagatgctaagattagatgggatattgaaatcgtttctcatttcatcttctcttatacccgtatataatcctgaaccaacaccattatcccatgcagataattgtatattttgtataactcttcctgcatctagtacatgaaatccgtattttggatctgttaatattatgatagcaaaatttgctccaattatccactgcccactagtactatcttcagacaatttctttaagttatttttttcttttattactatgaatctccaatgttgagtatttagaccactgccactatacctagcagaatcaagaattgtagatattatgcttgacgagacattctcattattaaattctcttatatccagttttgtggcaatacaatcaatagtcttcatgttctgaaatatattaagaatactacatatttaaaaaatttcaatttctctttagatatttaggaactcgtacagtaaagtaaagcaaaacaagataattaaattctgatattttcaaaagtcttcaaatcgtgagatcgacatattcatccaaatatagatttgcgatttagttttatatacaagattctcgaaacatatatgataaaacaggaaatatttagatggaaggaatgattctattccgtataagatcaatagttttctccaaagaggaaatagaatgttagttgatattatggtagtaaaagatattatcttacctccaatctcgttacggtctgaagtaactataatttttcgaatgttgttatatatgcataagctatcttttcgttgtcagaatatgataaaaaacattctgctcccctatcatgtttgattggatctgtaacagaggctagtagcactttagtatggtcaggcactatggtaatattatcgtcctcatattttgcagcatagtctgacatttccaataatctgccgtagaactctgcagagtttggttgatagataaagtgtcaatcaatcatccttaattttagatttaatcgatattttactattggcttaatagttaaaattttttatttagtatgttcgtgatagtcttaaattgctaccttatcaacatcttattccaactcaattttatagtcaaatttgttattagtttcaatggatgacgcgaactaatagttatgacgatgattgaataaaagtatcttctagtcaagtttgcatttcatataccttcaaaattaattcttaaataatgttatctagaaacaataatgattttatagttgactacagtcttagcttcgctacaaaactcacttttggtagcgaattcttcaaaagatggatggagagttcaagaacacttgataggattggatccaagcagcctggcatgtgattcgcaaaattctgatagggcgtattgtggtacttttgataatggactttggaaaactgatgataatggctatacatggaataaaacgtcgttaaatacctctggttgtaacatcatgtctcttgctacacgctctatggaaaaaggtgaaaagaggtttgacaagttatttgtaggaatggaaccaagtataatttattcgtcaattgatggaggtaatacatgggaaaagatcgatgaatttaataaattgcattcatcttcgagttggtcattccctccaagaccgtggactcatcatgttcgttggatagaacctgatgtaaataataaagaatctattttcgttgcaattgaggcaggagcactaatcaagagtgttgatggaggaaagtcatggatagacaaagcaaaagatgggccatacgatactcacacattaagaactcataaaaaggtcccacaaagactctactcagcagcaggagatggatattttgaaagcagagattatggaaatacatggtacagactaaataagggactagaaaatcatacttatctttatagtgttgctgtaaattctgataacccttataatattatagtatcggcagctagtaatgcttggaagtcacactccatagaagatctagagacctttgtatatagatgtgattctgacgaagaaaatcaagaatgggttttgtctaatcgtggtttacctgaatcaaagggaacagtaatttctattcttcaatctaatcccaagatcaaggatgaattctattgtttgaataatagaggtatatattgctctgaagattcgggaatatcgtggaatatattagacattccttggcctaaggaatatcgtttacaacatccttgggctttggcggttagataataacttgccatggttaaaactttagaccaaaacctttaacgattggtatgatagatattcagaccagggttttgttattgtaggagtacattcaccagagtttgattttgaaaaaaatctaggaaatgtacaggatgctaaaagagtttggtatcaaataccctatagtcctcgatagcgaacacaagacatgggatacttataacaataattattggccaaggcactatctaatagattctcagggatatattagagatgatcacattggggaaggcggctataatgagaccgaaaagaccattcaaacactgcttgcagaaaaggcttctttagaaaataaacccgaaataacgtttaacctaaacaaatcaaatcaatactgtctagtatgactttgggtagccttgattatatgaaccctaatcaaaatctctcccctgaaatttatcttggatattccacagccagatctccattaggtaatatagagagcttccaaccggatgaatcagtcgactataaatttgatccaaataaaacgtctttggaacctaatatcgtttactttgatggaatttggaagaacaaaaaagacaatatggaattaattaatgataatggtaaaatcattctgacctattatgcaaaagcaataaacatggttgcatcaggtaatggtcaacaagtatctatcttagaaaacaacctgtcaaaaataggcattgataatcatgctattgatgtccaaaaagatggaaacgttatagtcgacaaacaaaggctatataatgtagggctttatgacgactatgagccaagatcaataatgattgatgtgaaaggtaaaaggtttcagatatatacatttacattcgggtaaaacctacactatctaaaattcaacaaaagtatatcatatctttcctttcatttcaattttaaagatcttgtttttgcatcattatgactcactgacttgtacataaaattatcagaataccaaaaccaatatttggaacagatttggatctaatatggaagatcctttatagtctttcaatctaatctattctttatgaatggtaatggacattaccctatttttaagaaaattacttatctaactattggtgtagttgccttgatgataacagtttatctagcttcgccattgttcatatcaacagaaataaatgagcaatttcctaccaattccgcttcttcaatatcttttgataagtatatcaaaatgggcgaggatgaaagggtcagagccgcagagaacatgagtaattctcagaaaaaccaactgatgattcaatatgccaattcaagcaatgatagcagtaacaacaaaattgatgaatctataaataaaactgttacttcatttgatccaaatcaactactaatttcaggtgtatttaccggtgttaacgatggaattcacaatgcagagggcatagcaaaaattattcccctccaggacgatacaaatgtacttagattagaaaatctaaaggtaacaaatggacctgatctgtatgtttatttatcaacagataataatgcattagattttgtaaatcttgggaaactaaaagctaataatggaaatcaaaattacgatattcctctcggtactgacttgtcaaaatatgacaccgccctgatatggtgtaaggcattttcggttctatttggtagtgctgaactcaaagttcaatagaaaaaaaattgtagatttagtcaatacattacagttactaatatagtaacaatctgtgaaatattcttgtttatgttggctttatacatacatacattgaagggtagatagtatatcaatactttttgccacgaccagatcattttgtactatacaaataattggagttattcaaaaatttggaacaaaattggaatagatatggaataatgcttataatcaaagcattacaaacctacttttgataataaaaatgtcaacaacaaaattactagtaaaaaattttgactctcctgatgaagtaagaacctttgaaaagggaaaagttgagattgtaaacttaggcaacgtcataattggtagagcaatcctcgagccaggttggagttgggggaaatgtgtaaaaccattagtcaacacaaatagttgtcaggctcctcatacctcagtaattatctccggaaggatgaaagtaagaatggatgatggaaccgaaattgaaggggaacccggagataccgcagtaattccaccagggcacgatgcttgggtagtaggagatgaaccctgtgtttctattgactttactggtatgggagattatgcaaagaaatcagaataagagatataatcctgctttggttattaaaccagatatcttttggttttcaaagatgattttttatgaatgattgctttttattttgataatccattcattttattgcaagcaaatcaaagtacctactaaactagggacctacttgcttcaatagtttgtaatctttcctttatacaactgaaaattaatccatttatctggaaaaaaggtagtttaaaaattaagttaaggaaattcataattttttgagtcaagcatgttataacaagaaataatttttctttccgactgtgattcagagattttgaattaaaatgatttattcgtctaatttcatactaaatcagtgaaagaatatgatgtggaaaataaaaactacgataaaataaggcatctagtagaagttgacgatgacattttggctgtttttattatggtatcttctcaaatgaaagaattgtatattgccgagaattccagcattgataaaaactatgtagattctgcaatagtcccagctttggggctgaaccttaaccacgtcagagatgataaaacacctcaaacagataaaataccacatgcagcagtagtaaataacaatattcttggaagattaaaatggatagttttagaatatgaaaatttacgaatactaaaaatctatgaatttgagaaaactatattcgttctaataaacagtaatactcagctagaacacacggttgataacatattaggttactactacgatttggatgatataccaaaaaatttgttctaagattgttaagcatcgtgcttgtagaattagttcgttgggtacaattaagaaaaacaatctactttactgttatattattataatgaaaatattgtaggatatttgtagtcgatggcatctgaatctgtctttattcatattatcatttctctttctattcttctattttctgccaaaatatttgcagaaatattccaacggataaagcaaccggtcgtattaggtgaattattggcaggcataatcgttggtccctatgccttgggtggactcccgttatttggaggtgaacctttggtggtgcttgatgaaaccatcaaatatatcggagaattagctgccatcataatcttgtttattgcgggacttgagattacaccaagagagtttctaagaggtgggatggcatcatttacagttggcgcattaggtgtaattgtaccattctctgttggatttatagttctttcaatatatggcttcgattcatttgaaacactgctcatagccacggcattaacagctacaagtatagcgatttctattcaggtattaaccgaattaggaaggatgcaatcaaaagaggctcgacttatacttggagcagcaatagtcgacgatatccttgcgatagccatattatcagttgttgttactatggttcaatcaggtaacactactcctcaaataatggatatcgcattcataattcttaaaatccttgggttatttgcagtgttactcattggtgctatctttttcattccaagaatattgcatagagaaaaattgtggaagtcaaaaggtagtatagaaggaattactacagccattttctttggtattgcaggtcttgccgcctatgtaggtctatctccgattgtaggtgcatttgctgcaggaatggccgtagctagcactaagttagtcaaacaagttgaagaatatgctcacaaattacaatttatttttgcacctctattttttgcaattataggtgctcaagttgatctaagaggtgttaatatagatgttttgataatttctggaataatcatagcaatagcaatttccacaaagttagtcggatgtgggttaccgtctatgatatttcttaaggataaacaaggatcgattagagtggggatagggatgatatctcgtggtgaggtcggattgattgtggccggtgtaggggtaacatcgggagtactctctacagatatctatacatcaataattattatggtggctaccactacaataattactccaatctggttgaaaaaatcatttaagaacaagttggcagaaaattagataaagtagtcgattatggcacaggcataggtgacggctctggagatgataaaataaagagtggaataggcgataacgttgaatatataataacaatcaatttccagaccagatcatattcaacatcgaatccctctggccccgaacctttaatcaaattccaagaagagaacaaaaattatctaatgagtataatattacctctgaatccattaaaggctaatttaggatctaatcacgaatatcaatacaacctcaaatttgtaccgttaacaatataaatccgacccggcccatttgtcacaatacgacctaaaggaaaaagcatcatttcacaaaatattatttttttatctgcatttttgatttctaaagatacagtaaagaagaaagttaacaagcaattaagtaaattatcgtctaaaatcatgtttgatagtgatacgaatacggtagttaattccttaataagcatcaaattatttctagttctctttgtaacctttatcttcgtatctatcagaaagaaaaaaatttatttcactagtaatgaaaatttggtgtttgaatcatgagttgcaatggtatatgcgaacgattctaagcaaaaagaaatcatacgattccatctagatataaggaaggacagaagagatgtagcgtatgcgagatttttataaaatgggacgaaacttattgtccttgttgtaactataagttaagaacaagatccttccgtggttgggaaatgaggaaaaagtatagggaagaaacaataaaacgatactaatcattatcctcaaaatatatacattcaaattgattgatgtttgaaacaatgaatttagaaaagatgatgcaacaaggattaagtaagcatctgactattacccgccgtcgccctctaaatggacggcgctatgacttatggtgaatagcagttaatcaacctaagggagcaactgactaccattgtaatatttaagctgttaaaattaactgtatatacactaactattcatctacaacaaaatactttaattaccaatattgatcatggatgagataatatgcaaccaacttttgaaaaaaaagtaattgtctatggtttattcatagcaatattagctggattaacatttgttataggtcagatactaatggaaaatggcaacaaagtattagggctatcagaacaaaataatcaaacatcaataccacataatgcaaaaggacacgagtctcatcaagtcattatatttcaaaattctagtgatggtctaaaatatacaggaatggttacattcagtctttcaaagccggtagatgtcatttcatttgaagaggttactaatggacaacctgtaaacgcgaccaaaaagatttgggaagtcggagataaaaaatttgtaccccgcacacttttaaaaaatgtaactgagggatctgtcagctttaatgggagtggcatattagcgcacagtactgctggagataaatacactggttcgtttactctcaatgataccgctattagcaacaacaatagtagtagtcaatagattttttggtaaatacaaaggactagtattgaatggtaaccgcccataaagggcggcgcaatcatcttccgcagtccttatcatatgaagaatcagcaatatttaccacatcaatccccggattggtttttaccgccttaaaacaattttgttttataaataaattacaacatatatagaatatatttggataattatggtgtaaaaatctattatgaacgggaaagcaacatcggtgagaccattgaggacgaagttaagtatgaataccgcctaaacacaataccaactttaatcagcctattattgtacaggaagggaacgagtcaagtagtcgacaaaatcgattataaatccgcggatttgtcaacaagtaagaggattgaggctcttaacactttcgaatatatttccgacttaataagagaaggcgaatctaaaactgtcgaattcaaaggatttcaaaactacaataaaatatctgtcagaaaggatgaattatgcgaaacagtactgtcatttgcaaatacatcgggagggataaccattattggggtaaaagatgataaaagaattattggatttaaagaccaaacacaatttgataaactaaaaaaggatttgacaaacttgatcgacggaaattgtgagcctctaataacatgttttatggaaattgttcaaacagacaagggcgaaaatttactaattattcacgtacaaaagggcaacaatccaccctatataaggaaaggcaataatggcatatttattaggataaatgatttggatagagattgcagtagggtagaactagatcacttgatatcaagtaagaatgagaacctgttgacttaaaaagaagtgttattcagtagcgagttagtaacatcatatatgacagagtatatcaaatagagctcttattttaaaggtgatagtaatcatagtgggttatctgataaaaagattctattcaaccttgaaccatatccccccggaatttccctctggtgtgctaattctttttgataagtttgttataaaattcaactccagggttttcccctacttttaattgtataggtaatgagaaggtttatactttttattcatagatatcaaactgttgtatatacgttctaaacttatgccatcattttcaattattgtaattttgacagtatccatagtttctttggcttccgtgacagttctttaccatgaaggatctgattcatggatcacagaatctgcttttgctcaacttactaataacaatattatccagattgtaagcacttctacctttacagacgactttggtaactttcatgttataggtgaggtaaataacacatcaatagacccccaaacaaatatcataattactgcacttttatctgatacaaacaccaacgttttagttggaaatcactctgcattctcgtcaatatcaactcttagacaaaccgaactatctccatttgatatagtaatacaggatcctcagatattaggcaagtttaactttatggaattttctactacttcgcaacctgcaatagagaaaccagcaaaccttgtattgaatggaactagtgcctatttagacaatattggaaaccctcatatcactggtaatataatcaaccaaggacaatcacctgaacaattcctaaatctagttgcaacattctatgatagttcaagtctaggagttgtagggactcaaagttttggcctaaatgttggcaacttatctcaaaatcagatgacaccatttgatatcactatctttgataacaagacaaaatctcaaggcaagttctattccctaaatatggattctactcaaagttcaatgacttttccaaccaacacaaagtttccctttgcatctcttggagggtttgtcgatggtgggctattcttaaattcaccgctaaatgcaaatcccttacctgcaacaggaaataactttgatagtgataacgatcagtcatcctcattaggttccgataatgaaaattcggatggatctgatgaatcaaacaatgatttagaaattgatatagatgttgaaaaagatcctattgtaagagggaacgtacaaaccgttgatgtaacggttagtgatgcaaatacacaagaaaagattgcaagcgccgatgtggcattcaggatattttatgctagtgaacacgatgaaagtggtaatagccagacaaatggagatggtgtagcgacattccaagatgaaattgggccgaattcgaatcccggcacctttgatgtcactgtaaaagtcaacgcgccaggatacggtacagaaaccgatcaaacaagttttgaggtaattaaaaaatctgacgtcaataatggtactagtagtcaaaataattccacaggtgttgaaaacaataacggtactttgactaatggcagtcaaaatgaaagtaatgatgatttagactgtgaagatattgacgaatcgaacattcccgtaggagacgatccaaataaccttgatgctgacggagatggcctaggttgtgaatcagatggaggtaatgacagtcaaacaaacaatgacggtggcgaagaaccaaagaccgacgacgaaactacacaagagattctagaaggaattgacggaaccgtaataggtggaacaacaggcgattcatccgatagtaattctgaacaaacagatagagatggtgatggaataagtaatgaacaaccatcagacgatggggatactgatggtaacggtggtgacgatgaagatcaggatacctaagaaaatggtgaagagcaagattaatgaagaagaaaacagtgatgactcagatagcgacaataacgactagttaactatactataacaggaaatacattagattccgtgtacctcattttccaatggggtgattcaattttatatacaaagttctcaaattacatatgattaaacaggaaatatttcgatggaataatactataatggatgaaatcaataattttcttcaaagaggaaataagaagatagttaatattcagatagtgaaggattttgatgctatggtcactggagtaaattatatagtcttttatgaggaagatgctgacttcacattttaatttttataattgcatacgagtttaataacagtatttttcaaaaatagaaacaaaaggagtaaatcaggatgtaggagttgcttaatcactaaaaaattgcatattcaatctaatactgactgttggttttcatagttgtagttgtggaatttgaattaccaggtccgctagtagttgtggtggtggtagtggtagactgagagccagtatcatttccagatagggaattattgctactattggaggcctgatttatcgagtcaaatgtgttctcaatattattatttactgcattatttatcgaatctgtaagactctgagcatgtgcaacttgcacgatagataataaaaatataggtaataagattaaaccgaagttcatgatatacatagtatgacatactataaagggatttgaatatcaggatactgacaattatttcaatgagaatcacgatttagcgatgaattagtgtcattattcaaaaataaaatttcatgtttacgcagtccataataaatttagaaatggagaataaaaattagttacactcgaaattttagaatatacaattacatgatataggataaactcaaggattaatcaaagaagaaaggaagaaaaatttgtcataggaaataatcgaggatttgaaccctgagaatactttatttataattagaagttgaaactaaatcctgaatatgatttcacaactcgcctgtatacccacaaatacctgaccgggatgaactaacaatagggaaagtcatgtctttaccacattcatatttcacacataggatttacaaaacgaagattgtgttttaccaccttcattatcataaagacagatagtacatatctcccgtagcattttcttttttgcatttaataatctcgtaatatctggtcgataaaaagagtagacaaatatgggcccacttattattcgttgcaataaatccataatttctggcatcacatccttgcattgtaaacacgtttcgcaaaccctattttgaagatctttactatcactagactataatatttgtcgatggaaaaatgttctctaattaaatagggcaattatcttactatttcttttttgtaaattatatgtataaagtttagaatcgtatcattaatattttaagtatccaactgaatattgtgataactaacgttactactagtgcaattgtagtgatgtccttacttttggtaggctttcaatcatcggtatttgcccaaagttcatcagattcaattaattcacggatagaagaagcagaagaaaggataaaccagagtttgaatgagaatcaagatatagaatatccaattgatatagatatcaaatggatactctttttcaccgatctctttgcaatagattaaaccatcctttataaccttacaagaagaatttgtggtggaaataaggagtataaatactgtttaagtgtaccaatgattctaaacaactgttagtacatgggaatgctcataacctatagtgaaacgtgatgcatccacggtgttctcaagaccaactcttctttaatgtaccactaacacaggacgttttgatatttcgactaaatttcttgaaacactgccaagcgcctttatttttgaaatacctcctaatccaacattccccgcaactataagatctacttgttcttctgttgagaattttactatgctctcagcaattgtcctgctagaattacttcctttgagcaacttagttcttatcgaaatgcctgattctggatatcgagttttgatctccgataacttatttaaccattctgtctccattatccgattcatttcttctatgaattgagatagagaaacaacttgattggtcttaatagacttcacaggtttttccaatcctgagggcacatgaaaataacgaagtatagttatcagtattacttcactaggtttatttcttacatcgttggcactgggattcataagtttgagcagataaagcacatattccaaggcctttatggatggagtagacccatcgataggaactaagattttcatcaaactaaattacttatggtatagtatatctttgttcatagatatcgttgtataacccatcccccaattttgttgatcaacaaccattccatgtggtaaatttttgaatatcatggaatactcttttgtaatctctgcgtcacagaaaaagaagatactccgtataggcataagcgaaaattgaaataaattcttttaattgcttgcattaatcataattaataatgaatatgtatgttggatgctctggatggacatattctggatggaatggtgcattttatctaaaaaaccttgagaaatggcagagactatcatattattcaaggttttttaattttatagaagttgattcaactttttattatgttccttccaggaatgtattccaaggctggaaaaacaagacacctgacatgtgaacaaatctccatccctctaacatgtctagtccgtgtataattactttcgaaaaccaaaccaacttacacttcatgagttatatcaagtttaattattagcgtggagatagagtcaatgaatccttttttagtagtaatagcacaacggaaaccttcggccccatctgttgtaccttttaatattttgatatttcaattttaaatgataatcatttcaaaatcattttctttaatttcgctgataccggattcattttgtaatagtagttacacaattaaatttgcacttattatagttatcgataaagtcaaggaaaaagtaaaagatgtaaaagatgcagttgtagacactacaaaggatgttgcagataagacaaaggataaaataaattgactactacttttttgttcctcacaaaggatcttagttaccaactcgttgtactatctttatcttttacatactgttttgaatgagtatttactgaaggagatacttttgaatcatatttattattttgtaggtgttcttcattcattggagttacattatttttacggtaccctgagaatgactcggctatcgaatcatggtttctctgctttaattcttctgtgatatattctctgagtttactcgaataaatgaagttatctagtggaggattttgcgcgagcttactggtgattgattttgaaatatctttggcaagtaggaacggtgtaccagctctactaattcccctcacaagcttttcctcgtcaaatttttcagaatttccactctttttttctaccattaattcggatagaggtgctttttcttgcggattctcagtcattatattatattgcgttaattctataaaagactagatcatttagtgtcaaactttatcagcttaccaattcaattagttagttttatttaattaatccacttctaattacagttaatggatacaatccattaccattaaaacagaaaaacaaaattttaagataggacaattttaaaataacatagcagaaagatattgcagaattgtcttaacaaactctaatatttattattcgtattattatatgtacatcaaatattgtctatgcgaagcaacaggtcaaatcaactggcaccaggttacggatatgactactaatagatcaatatttgttattcattcaaacctttttctatatattaatgcaatcgatagtgcccacaaatgttgcagtccagtattattatgttatggaagtaacgttaatcatctcagccatgctatcaggatgatattcacaataatatttcaaaacttgtggttgacctgtattaaacacaaattgagtagacgaaccgtgttctacttcttaggcttcggctagatgttccccaccttgttgaggttcgatctttaattcgtgttcggcagtgtcattttgatagatgctaatcaaaaatgtgtagcctgtattagctttgaggttcagaatcgggttaaatccaagttcatcatttttccacacataagagtctcctatttgattggcagttaattcaatgatactattttcatcgagtgtttgttgtgtctgcccgaatgtaacttgattaaatggaaaatttaatgggataattaaaaggcaactaacagatattatgataaagttgtttgtcaatacgtttaactttaaacacattctcttatactttctttttattgtttattatttaccagttgtattaataagaatctgaattcataagatcaattgtaatttcatgaatgaagacaagcagatggagtctaatgattcctcatatcgttacgtaggtttatcaacagacataaaacgtggattctctaaaagctatcttattaaaaacgaagaagaaaaaaatatagaaatagcggtttttaatattgatggggtatttcatgcaatctctaattcttgcatacacaaaggagggccacttagtaaagggttccttgacggagatatagggacctgtccttggcatggatggaaatactctgtaaaaactggtgaatcttctcatgaaggtggagatagtgttaattcatataaagtcaagataatagaagataagatatttgtaaattcaattccctcaactgttggaaaaagaatatttcagcctcataaagcctatttgaatctaaagaactctagaaaattatttaatccacaagtccaataataaaatacttccggtagatgataaaaaagtaagaattcttggaatttctacgacaaacacaaatgataaaatagcaccacgtaaaagcacgtctgaggatacattaaatttagctctaaaatatgccaaaaaaaatttagaggttgaaactgtcatgatcaaacttcgggatttggaattcagtcattgtgaaggatactattcaaagaatgctaacgcatgtatttttccttgttccatttcagaaagagacagtgaagatcaaatgatccaaatttatgaaaaagtaattctgtgggctgatatagtattcattgctactccaatacggtggggtagtgcgagttccctatactataagatgattcagagaatgaactgtgttcaaaatcaaatgattacccatgatcgatatctaataagagataaggctgctggtttcataattacaggaggccaggataatgttcaacatattgctggagaacttttgtcattttggtcacaattgggcttcatatttggtaaatttccgttcgttgattggaccagaggttggtatgctgaagatacggaaaataattatgatgaaatgatgtcgggtcttagcgtaaataccaatactgtaaaagaaagtaaaaattcgaagatgtataaagatttggttaagacaattaatggcgccttcgaaatggccttacttgtaaaacaaaacagataagtctaatagtaatgttaaaacaccttccctatttatcatttgcaacaaatttgttcctcaaactatgtcagctactaccactaccatgagcaaaatgacaattccatttgacatattgttatagaatcgtattgaatggacaaatctccttcgatataatgggtttatctattggatttgtaactgatttgctactcatatcacattcagaggagatttttattgatcataatctattttaatcaacataatttaagtgctgttaattgggaatatcaattatggtatagtgtatcttctaaagtgaattttgctgaaggtagtggactccaatagtcttattagatcttgttttccataataatgtggtataccttggccatcttgcgccattaagactacttgaaatcctgcaaaaattcttttcttacaataccttatcaaattatctgcttctttttcattacttaggacatccattgttgttgcaaaaataccaatttcaacgccttgttccgttataaatgcggcatcgaagttcatctattaatattggtaaacatgatttaagtaattcaattaatggatttagactcaactaaaatgattagtcgcactccaatttgaagccatactcattttcagcaaattcaatcgaatttccacaataccaataagatatccacgttagaaggtcaagaattaaatcccctcctagggccttatgtatagtagctttcaataaaaaagtaaacttagtgaattgactatcctaataatttaacaaatactattaactatgttacagctactatcaatagaaactaactcccacgtataataattgttattgatttatagtatcaaaataaaaaattggcagtaagacctttaaattaatctttaccgccttcacgtgctactcttttacgggtttactcgtctgctgcttgaagtcccctttcatcatgtggggcctctccacctgctcttgctactctttctctagtttcttcatctgccgaggctaggcctctattgctgtttttatcattgttatttcgtgccattgtaaataatttaatataatattttatttaactaatagaggacttttgcctgtgtattactgtttgagagaacccatgacagagactatgctcaggtccaagaatcaaaacgagtttcgtagatttttgaaaagaattttgctaattttataatacctattattctggcttaaataatatgtcgtatttgaataaaatattttgaataaaatagtttgctagcctctaccctaaatatttttatctaggtaaactaaacacaaaagtagatccaattccatcgttattgttaaaagcccaaattctaccgccgtgagcctcgactaatttcttggtaataaatagtcccagaccggttccaaaatcagagtctgttgtaaatttttcaaataactttggcagaatctttgatgatatccctttaccagtgtctgatatagcaacatatatcatttcttcttctttttcgattttttttcgttctccttcgctacttcttttttctagtatcaggtcatctgacgtattattactcttttcttctgtaatatgatttgtttcgtctaattctgtttgattcaaattgaggtcaaaatcgttgctatctcttatcatgatattaataatatcgtcttttttagaaaatttgatagcattatcgattagattgactagaatttgatttaatcttaatttgtcagaataaacccaatattgttctcccaggttattatttataaaattcattttgatacctatctctctgactttttggctaaattcaacctcaataagattatctatctctttaactaaatctactttttctctatggagtataatgttacccttactattagactcaaactttgcaacgtctaagagattattagttaagacatttaatcttaaagcatttctagaaatattttcatgatgctcatgaagtttcaccataattcttgataattcttcatctgtgattttttgtctattttgcaagataaagtcaaacaattcatcattcatttcagaatatcccgttatggcttgagttggtgttctcaattcgtgggctgccgtatttataaaatcatccttgatttctccctcatgctttagttcttgagcaagaatactttgattatatatcatttcaaatattgaactatacgataaaactgttggaatactattagaatagatagagaaaccaattaacggatttgtttttccttcctcctcttctaagttctttatttccatgataagacaatcttttttatctaccactaatgattttattttaatgtcaatgcttggtgcaatattttgaatttggatattgttgttgatagtgttagttaaaagtgcaagagacaatgattttttgactgtagaatctattggcacaagcatgctaatctttagattttctttttgattagacatttcctttaaaagttcaagtgttcctgtcttttcctggagatgaaatgcaccgggagtagagtaaattatttgtatttctttatcggcttctctaatcatctcaaattctttactttctgctttcgcataatcactaaaaacagtggtaactggtgagactattcctttttctatttctcttatcctttcttctgaaggtatgcccttatcccagaaagtatcaaaaacaaactgttgttggtttacaatttcaggcacattgctaaatataagttggggtatgggttgtgctttgtgaagggttgctacagccacatattctttttcatctgctacctcaaagtttcctttcattccttctaagtgtctaatttcagagaattcaagcatttccttacaatacttgaggttgtctgcagtcatctcaatcacatatctaagttttatccctcttttcttgaatgcagcaattcttgcattcttgatggcttttatctctacaaatactgaaggtgcagtagaactaacacaagagtcaatcttttctctagccttattaacaaattctataattgcgctatctgcctcttctgaaccatgaactactttagtaaatggattgccttccttatcctttaaaatatctgaaggaaaatgtccagagttatcaaatggctcgcgcctattctcattatttttagttataagtgcacacccaaatctttattatgatttatagttttcactggatgaatgcgtccgcacataatatttcatgaccatcaaagtataataacatcgttctaaccatgagtttctcgtttgcatcctagtcgtcatgttttgacctagatattagaaaaaattgacaatctggtgtttgaaatacttgaaattcaatcgagttttgaccaaatgatgataaccccttagaaaggcctagattcgagtcccaacttcatctagttctttgaattaggaattagtaacaggtatcatgttttagaaaattacttaatattgaattagctatactaacctgatctttctatccaagtagcccaaagtattcttactatttattatataaaaaatgtgttataggcgcgatgggatcttggtatttggtatatctgacatgtggaaatcatttcttttccttatctttttaagtgcatcttcaaaatgtttcatgcttatttctaatcctgtagattttgattggttcttcgggataccatctttccgatcattgtcaggactaccagaaatttcatcagcatcttctaattttcttgatttttctcttaagaatatgtgttcttttattgcagctatagctgccgcattaaccaatgcttccaaatcagcacccgtatatccttcagttagttctatcactttgttaatatcccatgttgaatctagtggtttctttttggtatgtattagcaatatttgtcgcctagcgtctttatctggtaatggaacatctatgattctatcaaatcgtcctggacgcaacaatgcttcatctattatgtcgggtctatttgtagcgcctattataactacacctttcaagtcttcaaggccatctatttcagtcaataattgagataccattctttcagttacatgggaatccgttgctgaactagtatttcttctgggtgctattgaatctatttcatcaaagaaaataatacaaggagcagcttgtcttgcttttctgaaaacttctctaactcccttttctgactcgccaacccatttagataacaattcaggcccttttatactgataaaatttgattctgaagtggttgccaccgcctttgctatcagtgtttttccagttccgggatgtccatacagtaataaaccttttggagactttacatctccttctgaaaataaatctggatacttaagaggccactcaactacttcggctaattcgtctttaatatcagagaggccaccaatatcttcccaatgcacatttggtttttgaacctgtatttctctcatcgcagaaggttgaatatccttcagtgcattttcaaagtcatcgtcaattatttttattttgttaagaacttctattggtatttttgattgttccatatttattttcggtagttctctccgtaaagaacgcattgcggcctcttttgatagagattctagatccgcacctacaaatccgtgagtaatttttgcaaattgttctaaattgatgttatccaccagaggcattcctcgagtatggatttgaagtacatcatacctaccctctctatctggtattccaatttcaatttctctgtcaaatcgaccaggccttcttaaagctggatcgatagcatttggcctatttgtagcacctattactaccacttttcctctagccatcaagccatccatcagagttaataattgagatacgattcttttttctacatctccagagacctcttctctttttggagcaatagagtcaatttcatcgataaaaatgatagagggggcattttcttctgcctgtttgaaagtgtcccttaatcgttcttccgattcaccgtagaatttactcattatttctggtcccccaatagaataaaagttggcgtttgtctcattagctactgcttttgccagtaatgtttttcccgttcccggaggtccatataaaagaacacctttaggagcttctattccaattctttcaaatatttcgggatgccttagtggtagttctatcatttctctgactttttgtacctcgtttcttagcccaccaatgtcttcataagtaatccgaggcatagcccctcttgttgttcctttaggaatagcgctaataataaactcagttaaatgagaatctatgatagtaaccttgttggcagggcttataccattaataacaaaaccgatttttcttcccattatatttaatggaatcacatcaccccttgttactactctaccatcgagcaattctggaagatgctcttctagacctgctatgtttagctcttctgtaggagaaagtattagctgttccgctttttctatattatcaacctttctaatggttactctatcatctattccttcactaatattgttacgtgtataaccgtctattcttatcaaacctttgccataatcagaagctgggctagaccacaataaaacatatgtacttttatttttcttattaataacttcgataacatttccaggcgatagactcatcatttccattacctttggatctacaagagccattccctttcctacgaatttcgaattagtttcagcaatttttaatgattttgattgatctctaatataaggatcacctttattattagaattatcggtcatattattctcacactcacacatcctcgtggtgatttaataacaaaaattatagaaataaagtattttactttactctatctttatctcctttcctttagattttaacggagctttcaatttgacctttaattctaatatgccatttgaataactggctttggccgaggtatctactatctctgcatttagcggtatttcggtatgatactttttgtcgcctttttcagcatgtattacaatttgcttctccgatgcattcaatttgatatcctcttttgagatacctggcatttctgctgtaattgttaaggaattgctcttttcgtcgacagaagtatccaccaaaggttctctcgtatttgattgttgcaccaatccttttgaaccgggcttaatatttccgaattctcttacatgcggttttccatcagggcccactgttatttggtatccataataataaggaaaccttgaagcttctctaaacgaatccgcagttaaaggacttataccctgcgccgtattaaagactcgatttagcatttcttcagcttgtgaaaattccctatccatgtctccaaaaaaatttctgaatgaatttcttcttggaattaaatcccaattgtcaagcattcaaatcacctgacagtttgtaatacatattacattatatatttttttctaacagtaggcgccaaaaacatgtaaagtaaaaaatatattacatattatgaatttaggtagtttggtgatcaagttatgaatccaaaagaatttgtagcaaaaatcatcgttggaccaataagatcacgacaaagatttgtaaggaaatattcctcaataaggtgggtgctgttacctgctggtatcctgcccttactatctttgataagtacgaatttttttgtgtacgcacagaaattaaatgatgaaaatcaacagcaacagatcgcagaccagatgtatgaaacactaaatattgctcgggcaaaagtggaaactgcaacatcattaggagccatcggaaatggtgtaccagatatatatggtatccccgtccaagacggcgctgttaacttaggcgtctggcacctccttgttgtgtatttttacaaatagattcaaccagtttttgacatggtctagtttacacttctctttactacatggaaagtaatcgtcaaatccttcagttcgatccttgatgtactgcatagttctttcaatcagacttttctcaaacgaagaattgatatggtgttttagttttaggaatctacaagccattgggtaccaggttccaccgtctgttgatacgacatgttttccgtgaatcttgatcagacctgaaataaatctctctgcgataagcatgttcctctccttggatttattagctaagaaagagtgcgagaatttgcctattttctggttcgattgctgcccataaccaggagtattctgagccgacttttattaatgtctcatcaatgaggtattctgatatttttgttcttcttgttgaaacctttcgaggtttatacctttgaatccaattccaaattgcaacgtgacttctattgataatatgtaaaaaggacaatgccttggcagtatttctaagcgataagccaagaaagtacaaatacagaccatagtaaatatgctctgaagatgttttatttcttttacttaacataacagaaatagagcgtctttaagctaaagatttatcgttaagttaacagggcctccaagaccttctaatagtttttataattactgcgattgggagtatgctgtcttatgtagctgtcaaaacgtcgcttaaatatgcagataaaataaagatttccagaacttccatttgtcacaatatgacctaaaggaaaaagcaccatttcacaaaatattatttttttatctgcatttttgatttctaaagatataataaaaaagaatattaacgagcatttaattagattgttatttactttcatattttgtagatttacggatacagctgatcaatccctaataattatcagattatttctggtcgtctacgttgttaccatacactgcctaactaaaaagaaaaaaattttatttcactagtaatgtgtgtcattatcctattctttgcctaaattggatataccgcatatttttccttattttatttcaaattttctaaatcggcagaaagctaattttaagccaaaatgtttataacaacaatcaattaactattagtaggtatgaatctttggttagtcttttgcatatgtacttgtaaaactgctatttgtatctaattttttcttgactgtttgaagagtttcagactcaaaaaatgtttctatgagacggatgccctaaataggaggtagcttttattacataacctatcatataaggaatagtcagatctataaaactaacataccacagacgataaaaacttgcaattatcaacaaagtttgtgaagtaataaatagcgttttgaaaagtataacatatctccgacaagaagtattgattaggatattactcatacagttcgtcataaaataccttatatccttaaaacattaggttccaaaatattatacgataaataaccataaaatttcaagaccgaataactacaagcatacaagctattagttccattatttgttactagtccccacggatgaggcttctattaatatattgtatcgaaataaaagattggtaggaaatttaatcaagattcatcgtcttctcttgatacactcttacgtgtttctttgtcggcggcctgtagtcctttttcgtcatgtctcattataagaacccttgtgatcatgatcttttaatgaattatgatgatggaaacctcgcaatctttcatggatctgatttctatagagtgttaagcctatcctggaggcatatggttgtccccttgcaaatgattccgcaatgttctttacaaactccggttccacttttggaggcattggaggatcaaatggatctacatacgcttcaataattgtgggttttttttccttcattgcttggtgaatgattagtcctacatctcctggttctgtaatagtatagccttttccaccacattcatcagcaaaacttgcaaaattaataggagtaaattctacagcatattcggggtttccgagaaaagccatttgttcccaccgtatcattcctaatgtgttattttttattatcacaaccttgattggtaaatcatattgaactgctgttgcaaattcccccattaacatggtgaaacctccatccccgacaaaagccaccgattgcctatctggaaatgcaattttggctgctattgcatatggcaaaccacatcccattgttgcaagagtacccgagagcgaaaatttcattttatcatgaacaaaaatataccgggcggcccaaatagtattggttccgctatctacggagataatggcatcatcatctaattcattggaaacagcagtagctatgacttgaggtttaatgggcttgtcagtacgactgccttgttcttttaacaaacttgcccattttttcatttctttttgttttgatgttaaaaattcgttatcttctttatatcttttgtttaggagcggaatcagagaattcagtgtttgtttggagtctccaaccaaccctatatccacaggatatcgtaatccgattctctcaggtagaatgtcaatttgaattcctcttgcttgtccgggttttggaagatagtcaatatatggaaaggatgttcctatcattagtatcgtatctgcttcattcattgcgtcactggcgggactcgttcctaacatgccaatacctccaagattgtagggactgtaatcggaaattacggcttttgccaaaagggctttgactacaggggcattaagcatttcacaaatggtaacaacctcgtcactagcgtctagagctccttgaccgaccagtattactatcttttttccatcgttgagaatatttgcagcctttcttagtaattccggacttggaataacgtcatggttaaaaatatccgaggtatggccctttaccttatgtggggaatatttaccttttaatttttgttcttggacatctattggaatggtcaagtgactcactcctctacggcccaaagcatttctgcatgctatatctactgccatttcagcatgttctggtgagtttatcatgttgttatatgtagccacatcagaaaacagctgcaaaagattgacatcttgttgatagttggagccaataagatcagaataggtggtacctgtaatagccaggacaggtgtactatcaagtttggcatcatacaatccggttaaaagatgtatggcacctggcccggacgtagcaacacaaactcctaacttttttgtatatttagcataagcacaagccataaatgctgcggattcttcatgtctcaccaaaacaaactttattttgtcttgtctttgtcttagtgcttcaataaaaccattgataccatcaccgggtaacccaaatacaacatctacaccccaatctatgagtgcctcagccacaatatcggccgttttaaaattctcatattcattcatatattatgaagtatatcatgaaagtatttagtgacactcataattttagactcttaaatatgatcatcctaggatcatgattttttccttgtgatagaacccgaccctagggatctaaccgcaactggactccgataaatttgactattaggaggtggtttttgactttggagatatgaaaaataattcatttatgataaagcttgaaattattttatttatatactgataattcattggcttcatatgatataagtaaatgaagctagtttttgaagatcctacattttctttacaattgctgagagcaattagtgaaacatattctagaggagctgatattggagaatgtctgtcaacagcatatcggattaaggaaggtaattttgatagttggtatgaagaatggctaaagacagcaaaaaggatccatacttatgcggaagattgtattaataaacatcataaagtgagtgcacgagatgcttatctacgagcatcaaattactatcgtgtatctgcattcttgttggtcgagcctgatgatccaagaattcaaaatactatagaatcaagtaaaaaatgctttaagaaagctacggcgttatttccatttcctgtggaacaagtggaaattccatatgaaggaaccactctaccaggttacttttttcacgtaccaaaatcaaatcatagtataattgatgatctaacaaatagtagaaaaaatcttgacaataatgaaggcactctctatccaacattaatagcccatggcggttttgattccacattggaagagctatattcttttgcagctgcaccagcaatagaaagaggatataattgtttgatatttgaaggaccaggccaaggagaagtaattcgtaaacagaaaattccttttagacatgattgggaaaaagttgtgactcctgtactagattttgctttatcaagaaagagtgaatataatatagacccaaaaaaaatagctctaatgggcataagtatgggtgggtatttggctgcaaggaccattgcatttgaacctcgtatatctgcatgtgttctttataatggcgtttatgacggatatgattctataaaatctggattcccatcagaattatcagatgcagttgaaaaaggtgactcagagtttgtaaattcatacctaaatcgtttgatagaaacagatgcaaacataaaattcaatatgaaacatgggatgcatactaccggaaacaattcaccctacgaactaattactggagcaaaagcgtattcaatcaaagatattataaaagatattaaaacacccaccctcgtgttagatgctgaaaaggatgactcatttccaggtcaacctaaaaaggtttacgatgggctggtttctgttccatcttcatccaaagaatatatactttttactgaagaagaaggcgccgaggaacattgtcaatctggggctcctgcaattactaatcaaaggatatttgattggtttgatcaaatattaatgaataatccttaatttttttatttcctattaagatcttttctggttcactattacttaattgatcttgtttatcatctacatttatcatgatgaatcttaattgttattatattatagtatatgtatattttagataccaatagttgatagaatatagataaataatgagatcaatatgacaaggaattcagatgtgtaaatatgataaaatgataagcaaaattttctacccgctaacctttgattgcttgaataaaccatccgggtagggtgtttctattctttcttataaaatagctaaaagccgaatccaaaacatatgtccttgcccaatcatctttggatctaactgatcttccatatgcctgtattaatcttaatgctgtctgccaataataccattcttcatcaacatctctctttgcattagtccacctatcacttttgtttggatatggcactttagttataatctgaaatcttgacaggtcatccttcaaatcaagtcctgtgtgaagtgagggtgaaataagtaccgttggttttggagtggaagaatgttgagatataatttcgtctcttggtatttctggatcagtaattaggagccttcttgcattctccttagatagattttctttgataaagttaagttgctcatacgatgttgtatggattatgcccttgtcatttttatgagtagacattaaattatcaacgacattagaaattttagacataatatcaatagattgtaagttactgtaattaagatatgcaacttttaggggataaattgctctatgctctattggaaaatcagattcaacttgaataaattttacttcatcagaatctaaaccaatacttttacaaaatgccttgttatttaggatagtcgcactcattatcagcgttttggatcccttttcaaagacagccttacagtagggtgatatatctaggggttttaattccactttctctactttgtaattgtcttttttgatatctgaaattatccaattttttgggtttgcaagtatgctgtttattgttcttgtcaatctttctgtgtctttaatagcatcaacagtaagctcatcgccaagagtttttgtattatcttttgatgcaatttcaactttagcatatttctttgctatttcttcatcactttcaaacaattcagttgcagaaactattctctttttgtaatctcggttttctgataataactttcttgaattatagtattcaaatttaacatttctctccatatccagtacggatgccaaagaatcattaccaattgcagataatatgttggtttcaagatctattaaaaaatcaatccatctttcaatactgtcataaccataatcaactatatcaaaattacccacataccgtttccatctttttttagatattgataatcccctaaactttacaatttctgtttctaaaagatgtccctcatctaataccaaaagttccctttcagaaaggcgtttattatatggtaagaatgcaagaaaaatagaataattgaatatagaatgactggatgccaatgcgatatttagttgattgaagtattcacaaggtttccactctcttcgtatctttagtttgcttataggtaaccattcagaaaattgtttttgatattttcgtttagtatcactgtcaatgtatattttttcatcctttgttctttcattaattgtcttaaagtctttcgcaaacgtcctgtacttgcagccatcctctttaaaggattcattagttatacaagttccatattcaacagtcgtgtgataacattcatttggattagatgaagcacatataccacattgataggttccattgtctacaaagtcttgtttaagtaaacaagggaagttattttttcccttagctgccttaatatattgaaaatcattggaatattgggtttgtaagtctttggtagatgtacagatatagcttgaacctaagctcaaagcaagtgctatggctactgcactttttccaaatccggtcggagcttctaataacacatatctgtaaccagaattaaaggcagtacgtatgtcctctaatacccttttctgattttctcgttgtgttgaaaatgggaaattccctattagatcagatttcgtaaggggttgtggaaggttatacagctaaattcattttatattatcatgacggtattataaatttcagttctgtatcatgctcagagatggaaatggtagtttgaaattcacaacataatcgcaaatttttagaccaaatgacaaaacctaattaaaaaagatttagcatgattagggcgagtatgtacaatccatctttattcgaacctagtgccactaggaacttaatcccccgcagagcagctctttggtcatgactggactcgaagatattatatcttatctctaccgattaattcattaaaataacggaaaaaacaaccggtgcgtggttaatatagacacaaggcgaaggtaatggagttatgcaacaatgcccagactgcggatattgtaataggaacctttcttcctattacacaattattctaactataagttttattctctgttcatagtgctattcaacgacattattctcttatttgactatcggtttgtttgttaatgcatccataaatattctcgaatatcgattaaatgggtaaagtcatatttttgcttaaattaaagtattaataaaatgtaaggatgatgataatagatgaaatgtttaccctataaatttaaatttgactaggtattggttatctaataaaatgttgcgaaatagtgtttctgctagaataaaatatttcttcattttctgtataacagctctagttttagtaccattagttatgccagattctgcctttgctttgcaagctatttcgggaaatcagatttcaatacaagaacctatacaagatgaagtgttaatctttggagaaacggtaagtattgacgcacctgtcaaaggagcgataatatttgcaaatattattcatgtcaatgcaccgatagagggtgaccttcttgcagctgggcgacaagtaacggtgaatgcagatgtttcaggaaaaattgtagctgctggaaatacgatagatttggggggaaaatcaacaaatgcaatattagcagctaacaacatacatttcgatccaacttctgtggtaactaaggacgcgtatgttgcaggcggaactatcaccaatgagggtaatatatcaggacaactggtagcgatgactgacaatttccaaaacaatggcactatcggagacctagaggtaaggagcccagactcaatgatgccggatatagaggggtggcttaatctttttggtattttgtttgtaataggatttggtattttaggtatcatacttgtcaagttactaccaaatcagtttgattcagttcggttggttatgaaaaaatccataataaaaaacacggtggtgggatttctattaatcatattgttcgtagttgtaatagtactatcggcaatcactgtggtaggtataccagtctcagtttttggtttattggttcttctcattgggttaatcttctcatctttaatggtatcgtttgctataggaaaaaaaatcctcgagttattggggcgaaagccgtcgtcaggagatatcaacaatatttcttcttttttaattggatttgtcatactcaatcttttgtacgtagttcctattccctactttggtcaaatagcccaagtgatcgtgactagtatgggatttggagcgatttactacacggttcacaaaggtcggtctccagtttctaatgatagggtgactatataattattgtaatgctgatatacggggtcgttcttatgtaatagactgactctttcctccaataagtgtgtagtagatatctctgtgagataaaccagaattgcaattgcaattgcaataataggtaaggatgtaacttttttctagtttatataggctgtcgaattctttttgaaatcaaatgtccatatttgcattagaactctactatcacaggaaacatgatccacacgaatgagaactactatcaatatgttgtcaactagacattcatcgaaatcatcatacattgatatcagtaaagagaatcaatttgactcctagactctagttggtctagtaatcgataacctggtttaaagccaaaaatgtttatagttaatgaaaatgaggtttagataaacaatgaaaattggagttaattttgacggtttcaagatctcggattaccaaaatcgttcaaaactcatacccccataacgatatatacaagattccttcaaaattttccaagagcacggtatagatattgtaagaattcctgtttattgggagtcttatgaaaaagatccagaaggctttattcaagaattagacattatttcagatgaggcggataaaagcaatatttcatgcttatatgataaccatcaatgggaatgctcttcgtttcttggatatggaataggtttttccaaattccattgtatctcagctatatcaagacaattcttctaaacatgattcctttaaaccaccttttaaagaagatgtagaaaaattttggaataattggtgggataaggcaatcaagtctttggatggaagggatggatgggatttacagatagaatactttcaaaaagtaattgagactgtaaataataaaacatcaactatcgcatttgaacttttaaatgaacctcaggtgtttaggcatggtgattttaaaaaggtttcaaggtatcatgacaatttattaattaaggttgcggaaataacagataagatcctgctattttgttatacttatgctggccgtattagtgcatttaattttccttggacacaggctagaattaagccatccattgctgtaagcaataaaatcatgtatgatattcatccatatcctccatactacatagtaatgttgtattttagattaatagcaagactaatgaaaatggataccttgctggttggtgagtataactcaggtactggagatggaattgaaataagcttaagccagcacagcaaatatttgaaaacattcaaaaagtttttaccgcatggagtaatgttttggcagtggtcctatataaaggacaatggacacccagcatttaatttggccaaaacagttgatgacaaaatatcattaaataataactttgatagttttgtcaaagccataaaagaagcctcaaattaaacgatcatttggaattaattacaatattgtgctaatatcttaataatagatgctttctggaattatcaaaatcttaaccctgactaattctaaagcaaaagataagtatatctttacgttgtagaatctattgagcctcacagaaaaatgtgatatttatgctgctattcatgatgcaggaattaatagggtggttaaacatcttatgcaacaacgcccgtctctttttaattttggtacttcctttttagcatcaaatccaaatctattatgtgaaaaaattatagctgtaccagaagtaaacagacaacagaatcttcttttaacaatactcgatccaatccctgtcataggcttaccaataagccagtctagttcaaacaatttagcaataaattttgcaattcaactttccaaagctgaaatagatttttacgaagggaatatattttctttaccttcagaacttgccccattagcaaatcaacgtttggctgctcatttcaaagtttgttccggtttggattgtctcggtgacttgcctttcctcagaagacctccaaataccagaccgtctacttccaaactagaatgtttttgtctagatttgtatgctataggcggatgcaaaatttctggattagcagaaagccaaaaaatagggcttaaaattgatggtatagagatagtagatttaaagcctcaaggtctggaaaatgcgatcgaatgttatgccaaatctgttcttaatcatggaatatttccccatgttgctgagattatttccaaattgacatttgggataattactattcctccgtctaccggaagtttccaagtatctggtaattttcagctttctggaacaacgaccgttcctaataatcctgcaatcgaagatgatcaattaaaaacatttatcaatttagataatttggacttggatatcgtattctcaccagatactggtggtagtggtggtagtggtggtagtggtggtagtggtggtagtggaacaatcacaagaacagtaaaatcacgttcaagaacaggcacttttgatctaaccgctgctatatccgaaaccacgttcaaaaaaatatatggtgctcttcttgaaggatttaaattttcagtatcagacacaggcggctctggcatattctctgttggttatacagtttcggcacatctagagaatgggccgatcgatttgcgtaacaacgattctgttctaataagtgaattagatgttaaatgggatatattgcaacttaacataggtatagatattccaacacaaactattggtggattttgtctcgttccaaacccttttggtggatgtttgattcgtgctccgtcaattgatctttttgaagcatctcctgatatttctttacccttgaacttgggtggattaataacatctgaaattactttgagtgcaattccaaaggtgttttatggagttggctctggagttccaaacagatggcaacttactttagtccctacgcttccaatcgacttcgatataattgacatggcggacacaattggagatttgtttcataatctgattgtaaatgcaatcgtcagtcttcttagttctttgggacttcctgactgggctatatcttttatagataccgtgcttggtggaatagaaggaataattcgaaacattttagatattggagacgacgtgggtgaatttattttaagtttgattagtaatgccggtctattccaggacttgatcgataaactggctaaattcattgccctaacgattttggaactcaaggatcccttggaagtattagagggaaattctgccatacctctaattccagtaaagttaccaattgaatttttggatgttcggattaatggtaatggtaatgagttgatccttgaaggagatgtgggtaattaaatatgaatattaaaataaaccgatttttgtttagtcagaccaatattgatagtgggtctctcactccacattctaccattgtttgtaaatttacagatcctggagaatatcagggtattatgatgaaaggatcgggaatagttagcagatttaaattaaatgttcttgcggaaagatcatctaataggttatcatctttatctacgacaaattctaaggaggtttctcaactctccgatgaaaacaagcaagtaaatgatacttctaatcagataaacatcgatttaagcaatattatgagtctttatacactaaaaaaaggggactatgctgttttctatgtctctactggcgctggcggttattcgatagagatttatcgattcgaaaggggatcacaaataaaaacatttgatagcaaagaattaaaggatggagtgattttctctgcgatggtaattagacccggtacttatttgataacaaatacaataaacaatgctaaggcagatttaattgtaaactatccagaacttggaaagatgaagaaaattctcataccgattaatttagaaatcaatactaaagaaattgtcccaaacaaaataaacatcgatccatctcagggattgatttttaaaattaatactctatcaagaataagaattgaattgacaaaacctgaggacagaccactaaaattacacagagaacagtttgttataagaaccaaaggagatgaaaaattccttaaacgatttaggatgattcctcgtaaataaggacattgaccaatttattttcggtattatacataacaaaaacagatacagcacttaagaaaaaattactacgagtggaatgtgtaagaaaattaacgattcatatatctaattttttcagattacaaaagccccttatgattctttaattcattataacggttatcaaccttgaaggatagataatcaaatatcaaaaagatttttaaaataatatcaatcctgtattgtttctaaaaaatttgggggatactatcccggtattgttgcttaaaccgctgcagtatgtatcgtttttcttcttagtataaatgcaaatccaagggatactgccgatagcaatactgcagtagaaaataccagatcatatgactgagctgatggatatgatacttttgttccgatattttcatgatcagccatatatactccagccagggccggacctatggccatacctatgaacaataatagtgcaccaattcctacggatattccagtaaattcttttggggaggaagacactattatattccaaattgcggtcattgtaagcgataaacctgaggcgattatggccaagtttacagaaactatgaactccgttgcatggaacattagtaatccaaatgttccaaataggctaacgattccaccaattattattggttttgtactgcctatcttatttatgataaatggagtgatgcttgcaaacaccaagaaactgatcatgaaaggtaactgaacgtttgcagcgtctatcgaatcacctccgaaacctaacggagctggactcctcaccaactggactatcgttggataaatcatgaacatagtgattcctgtagctattagtaggataaatgaaggtagaagaattttatctcttaacaatctcaagttaacaaatgggggtatagcccttctttctattataacaaagacggataatgcgattgcagatattatgaatgctcccgcaatttgtaatatattttcattatttacaccaatttgaatgatagtaagtgcaatgagaaatgaagatattgtaactgaaagagccactatacctttaatatctatagaaaacggttttccctttttctctgaaacatttctttgtatttttgaattatttgatcgatttggtactttgtattcctttacgaatcttgcaattaataatgttaccaaaatagcgaaaggtattatagctagaaaagtagcatgccaaccaaaggtttggattatgctagctccaaccaatagtccaaccactgaaccagctgaatatgcagaaccaaaaacccctacagctatagatagtttagcaggcggaaacgtatctcgaagaagactaaatgctgctggaacagctgctaacccaacaccctgaataatccggctaacaagtagaaaagttatgttatctgcaaatccgccggcggtgagtccggttatatatattgcaagtaaggatagtaaaactttctttttcccatacagatcagaaagtctaccagcaactggagtcatcactgcagctacaattaagtatgcgctgaatatccatgcagcagttccataagatatatccaaatcatcaattatttctggtattgcaggaagtagcatggtttctgagaaaaaaactgtcaatagagtactactaagaattgctaaagttaaccacgcatggcgacttacaaccgtcgttgcgttaatcatattatttttttcattcctatctttgatcatatcaacttaccttatctcattaactataataaagtaagtatttaaaatagtaggtgacgatttggtaagtagaaagaaattcaaagaataaataataaataattattaaaaagagatataaaaagttaacctatagattctatacaaagtaatgataaaagatgggcattattatttgactcagtcatatatcaaatgaataaactttgtctaacaaaaatctttaattttgacgttcaaataatttattcatatttataccaaatcgagatattgaaatgaaatatatgagtagccattttaattgttgttttttaccattacgataagagacctaggaaagaaaataaaacatgtaatataatatcttgtaagagagtcagtcgcaatttagatagtaaacctgccaatatttttgattttctctttctataaacttattaaattagaatctaggaataacttttcaatatgtgcaaaggttgactaatttacatataatttcgtaaagatttggcggttatcttttcaattttaataggatcggggttgtcaaatatttgatcacaacaatatttgaacgaaaacaacgccatctgttccattattggttgtaattctttacctttttgagtaagatagtattctatcctaattggcgtttcattgtatacatgacgttcaataagacgtttaataagaccatccttttccatctcttttagccgtattgacaaggtttttgggttgatctcttctatagaattcaaaaattcgttaaatcgtttttgtttatcgtaatgcatattgcgtaatgttaaaagagaaaattttttgccaattatattaaagatattaaacacaggacaacatttgcattccatatcgtctattatcttttggtgaattagattttctttctttttttgatactgctctgaggttttgagttctaccaacttaacaaccctatatctacttacagattaattacttaccagtttatatacttaccttattatagttaataacacaaagtgatttatgaaatgatagaaactcaatgttactcaaattgtgcgtcttaccccagaattggagaagcggcaagacataatcagaatagtgcaagtgtgtgtggatgccaaacgatacctaatgactgctacagctgttcttactgtgatacagatccaattgaagcaacaaagaaactattagaaagctcattttttactgcattaaaggaaatccatgtggagaaaattaagaaaattattgaaagagaatggggaagtaccattgataggaccgctgaattagctgttaaaactattgaaaaacaatggcaagcttctgtatcatcgtcaagtacaaacaaagatttctatgaagaactaggaaagataatgacatctagtaggaaacaataacaatatggaattttgttttaattcatcattttttatgtcatttaatggaaatcagcatttaatagttttttattaaaaaatacaagaattcaacaacaaagaatttgtaaatattataagataaatcttttggcttgacttcaatcatcctaatagatgcaaaaagtgcccttatacataatcttgaaatattttatagtagttattagtggaaatgaccaaagtagttgaaatggatgaaagcgtatcaatattctctcaaatgaatgaagatgctggtccagttatattgattaacaaatttaatgtaaatccttccgagtccgatgagtttgtaaaggcatgggccgaagaagcagagaattttaaaggacaggccgggttcatttctacacaattacatagaggcattggggggagtggaatattcattaactatgcagtttgggagtctgcagctcagtttaagaacgcggttaacaaagttatgaatccaaatgacagaacgtctaaatatccaccaagtaccattgcgtcacctcacctattcaaaaaggtggcagtagcgggagtatgtgttgactaaaacatcagaatcgagtctggatatctttttcgcatacattatctattgcaatggcatataacaatactgatttagtagtgaaaatttaatacgctaatggactttgaatagataatttagatagccttaaaaatgatgacaatatgaaaatggtaaaagaaaatatgtctaatcatctaacaaacccttagctgccacattgcaaatattccttttctgtttttctcgtcggcatatgattggtacactcctactgtacttttgaggaattccaaatttccagtagcgttagtatcaaagaatgctgcacccaacctttgtattgtgttctctatcatactattcatatccttaagggagtaactggaactgccgtgctgagagacaaatggtgctctaccgacaacagtcgagtaccatctcatacttgaatttgactccgacattctgcttgcttgatactatcttttctattttctaatatcttttgtattccttcaagcataaagctatttgaatctgatgaaattttttctctttcttccgaacttaagaatgtgttgttctgtattcccaaattgtaaagaacgttttcattcatgactcttttggatgatgataagtccgtgatgacctttagcaaatttgtttttgatatttctcctttgatgattgttttaccgatatagtcattagtataatacatttcaccaccaatttcttgattatcagttactctgacattgtactttgagataaaatcctgcacttgatccttagttcccgtatacactataggtataattgaatttggtttttctattgcattatattcatgtgctaagactcgcaattctctttcagcttcaaggtccttatagtctgagtaagcagatcctaaaatttcataacagataccatcaacattgacattcacatttttctttggataataggtgaaggctaatgaaaagcttacagctcctgcaattataaaaatgataattaatggtattgctaatcttaacatattctgtctaccttttattttgaagattagcaataatctgtatagtatgtatagcgtctttctacttctttattgtttccactatttatgctatgaattgcttttcttaatccaccctttacgtaatctctgagatattctgtttgtgtatttgaaggatatagattagccaaaacatattcgaaatgtttcataaattccaccaccttttttctatactcttcctttgtaggattcttgttgtttgttaccttaaaccatgttgtagcacatggggccgcatatccccttgccatatcatcaattactctgtcaatttcaaacaaatctagttgcatgatataatatacgaaagtccaagtaatattcttcattgaaacaaaaatatcacgatatttctgaaacggaaataatgttatgaagtctttttgatgtacaggacagcagattttctattttttccgaaatagaaataaagaacaatttattatagtttgtcataaagatgattgatgaaatcgataaagtaattctttctgatttaagtaaaaatgctcgtatacctgtggctgaaattgcagaccatattcgacaaatggaacataaaataacggagagagccatacgatataggttaaaaaggttagagcaatctaatactattttgggatattctcccatcttcaatccatcccttatctcggataagataagcagaaccattctattaaaattcaaaattactagaaatacttctgacctcctggaaagattaaacaaatacattgaaaattcagatttctgtttgttttctgctagaatgagtggagactttgatttcatatgtcattttgtttttgattccatagaacaatatgagttagaaagtgataattttatcaaccgctttacagagttggtttcagaatatcgaacttatgattctaaaatcataaaagcaactccttattctatattagacgaacaagaatccaatgaaaagaaattcagaatttacaaaataataaattcattaaggaaatcagaaaatctcaacacaaagcttcaactcacagtagacagcttggtcaaatattttgatgctacatttgcaagaatgtggttgtttgataaagatggcataaatcttatcttaaaattcagctcaggaaaatacagaaacaacaacggcgagttttcgaaagtatcaataaagctagacagcaaaataggcacaattgttaagagaaataaaccagtcattacaaatgatgtagtaaacgatcccagaattaagtatcccatatgggcggaaaaagaaaagctgagatcatttgcaggttatccaataacccatgctggaaaacctataggagtactggcaatgtttagtaaaaagactctgtcacctattgaatttgaattacttggaattttcgctgatcatatatcaaaagaattatctgctttctacgaagccaaggaattgttaaacatgtcgtgattttacttagctgacataatcttttttttcttggataaaatcccaataaaacaaggaagttggttcctacgggcgagtaataactaaacttgttatagaaaaaaatcatgtcaacagaatatacacatgatcaggtagatctaaatgtccgaataaatcatcatgactaaagtattattgttcgattatcttttttataagaaaaataagtatgccttaaatcagataatgtaaatgaatgtcatgtgactaaaatagttaagctacaagtcatatcgccaccaaacacagagatgaatacaacttttactttggatgataaagatgttttgttcaaaaggatcgcactagaatcccacatttgtggttattgtggatttgtcttggcagaaaatgtaatggtttataattatcgcgacataatatcgcaatgtcctaattgtaaatcttttaatggggcaccagaaaatgataatttttagtaggcggttaggataaacttgtcatctccaggtttatataattcagactttatcaaattaaattagatgtcaagtttgacgcggcatcagcaatatgaacatgactgcgtgcctgttaatgatcctcctgttaaatcctctaatagttgatcagatactttcgtcgactatggacttctttcatcttaaatcatgaattgataaaaatgataaataacgcaacgaagattttactcttaataaaaaagattctccacctcatttctgaagtaggacatgtatgtcatccgtctctttcctataattttcgtatttcgtttactcccatattaaaagatggggtaatagatgtgactgaatgatggcgccttgactaatgcgtatttttgaataatttgttaaatattgctaatttttttcacataaaagaaatcatatgtttgaatgtattaatgtattgtaataaaatatatataaaatatatttctcaaatatttacgggatgataaaaagaaccaaactccaagttataattacaacaagaaaaaagaacaaaggcaacccgcgccccatgacgatataatagtaattatgatatggcaaaattttatattttatacatttaatttgtacatcttgtgaccgaaaacctttattcttatatagaactggcaagtaatattcggggtcataaactaggtttatgctgatgatacagaagttaccaacaaatttaaatcagaagactaaagtagtcataatcacttgtctagtgtgattatttctccatgtaaaaaccgtcgcgaattattaattgtttaacctttaaaatagaaacatacgtcaagaactattttagattacttatctgttaaaggtaaattaaacgaaatggtggctccgattccatctttattattttcagcccagattttacctccgtgcgcttctataatatttttcgataaatacaatcccagtcctgtaccttgaaaagactttgtcgcaaatttggtaaacaatctaggtaatatctcattatctaatgcaatacctgtgtcttttatactaacaataaccataagttgagggtaattgtcgcttctggaagtggtaatggtactagttatcttttcaacacttgtagttattgatataactcctctccctgtatcttgttctgaaattgatttaatagaattatcaattaaattagaaattacttgtcctattcttctgctatccgcatccactagatattcggtatcaaaatggcattcaaattttattttttttgtatcatccaagatgtgttctaattctttaattacggtcactatcaattcattaaggctaaaaacctctttatttggtttaaataatttactttcaaatctagtaacgtccaaaattttttcattcaaataggataatttctttgcatcttttactactctgtccagtaattccatatgatgtacatcttttgtcttatctctcacatactcagtcagtccgatgattggagtaagaggcgttcttaaatcgtgagccactatgtttatgaattccttttgcattttgtcatgaatttttaatttttcatgtgcatcttttagttcctgatagatctctgtttgtttccaaatactatcaaatattgctacataggatagtactgtgggtgcactatttgaataggttacaaatccgacagcctctgatatgatttgttttgcatcatctttagtttccgcaacgagagactgctttctatctattaccagtattgacactttagataggggttcaatgtattggattataaaattaggtttatttagtattgttatcagcctctccatttcattatcttttggagttagaattttaataattatccatggtttagcatctcctaactcctttagtaactgaaaagtacctgattcagcctgtctatgaaatgctttagaagtagacattattaccagtatttcagattcagcagagtttaaaagatcaaagactttattttgaatgtctacaggactattcctggattgcataacttcgggaacaattccttcttctatttccattagtttttgtgtaagaggttcagcctttttccaaaacatttcaaatatgtattgttgttgttctattacttctctttcattgctgtatataacaggattcaaaagttttgtttcactccaagttgacatgcctaaaaattccgaatcatttacacatacagatcccttcaccccatcaagatgtctgagttcacttacaatttcacctagctttttgcagtattgaatattatcttttgtaatctctgtgatgaatctgatttttgcaccccgattttttgctttaatataattactcttataaatttctgattttataattatagagggtccattcttatctacgcaaatgtccattctctcactgacattctctaaaaaactaattccgtaacttactgcagtatccatatcatatatcaaatcagtttttcgattacgaagtgtagtttgttcagagatattcaactactatagtaaatagtgatgtcgtatataaaaataataacaaagttcattgatctgagacatttaatatgccaataacaaatagaaagtgaatttcttaatccaaattaataaaacgaaaatgaataactatgaatgtcattctagttagttaattagaattgaatcaacaaacactgtttaactattcaagaaaactaaactaataacaacagtatttgtcttcatgtggtacactttgcactctttttaatgagtgatatataccataagatcaaaccttcaactgattataggttaacagaatatgtgaaatgtaaactcaaagacaaaaagcaaattaggttgcttgattttgtgattataatcggggcaaaaactccacacccttagtgaaaatattctgaatatttcatgtattaaaagcatctttttagcttaaaaaatgactccgccaatgatagtaacattaatcatcaacagatcttttggatttatattcatacaaacattgctaccgatacaaatgcaaccataatatcgaaactagatctggaactcggtgaaaattcatagtttgtcttgtaagacggatttgataattctaccctctacctaagtctaaaattccattgttttttctctttcaatactaattatataaatgatatttccttagatattgtatgtgctttgaatatgaattactccagaaagaagaacaagagaaaacgataaagaaggaaaagaagatatcccagcaacaatcagaaattggaaaggtagaagaagggtcaatacctgcctaatttttttaaatcgaaaaaataaataattaatcgaatattatcattaatgatacaattacttgaaaataatctcactaaaatccaatattgaggtctaaaagttgatcttttaaatattttcgtttctagatgtttatgtgaaatgcctagtgaagaatcaaggagaaaatttaccgattggtttaggaaaaattatcctcaagaatattacttctttcataaaatagagtcaaatcttgacaaactatattcaactaaacatctaggtcttcatgagggggagtttgctgaaatttcaataaatgtacaaaaacgcgaggggggtaaatatcacctggccgctgatccatttacatcaatttttcttggttcaatatgcaaaacaatgatggatgaatttgctaataacatggaatctgttgcctctgatagagttcgaaaggaatttgaagatagattcagtatcgaatgtctaaattgcaaagtaataaaccttacagatttgaaatattgcaatacttgcggctcagaactttcatcaaactaacaaactttatgattcatttgaaagtcttatatataataaccatattttctttcaataataaataaggatatatcttcaagtctatgaatgatgcaatgtaagtagctgataatatacataagaatagagtaaactgcaaaatgagtagacgagataatttaaaaaacaacttgggaacgattgccttatactgtatatcctccttttttatcattatgggatttatttttactgcctattggttaatgggtgccttctatcttttgttttttatgtttgcaggaatgatgttgttaggatttggtggatttatttttttagtctatatatgaataagttgaacaaccagaataaagccttgtagttgacctatgaaatggagtggatctttttaaaccgaattagaaatgctagttattatatcctttagatcttatattctaccattaagtcaaaaaatgtatctatatgtttattttatagttttccaattattcaaagatattcgattacaatgaattggacatgttagacgaatacaggaagaaaaggaattttaaggcatctcctgagcccattggaaataacaatctgagtaaagaaaattttccagctccaggcgatgcaatcatctcaaatgacgatcttaaccaatcaaaatcaagacctcggtttgtggtccagaaacatgaagcgactagattgcattatgattttagattggaatctattaaggaggatattctcttatcctgggccgtccctaagggaccatcgctggatccatccataaagaggttggcaatacaaacagaagatcaccctgtggattacttgtcatttgaaggagttatccctgaaggaaactacggtgctggaactgtaatagtatgggatactggtgaatacagcttggaaaaaagatctttaacgaaatattctgcgaaagaacaccaagagaatatcccagaaggtttagacgtgtctgagctagaaaaaaaatatggaaagattacgtttgtattatatggacagaaattaagaggcaaattttctttggtgaaaactaggaccaaaaatcagtggttattaattaaattaaaggatgattttgcttgtggctcaaacaacggtgacacgaatggtgaaaaagaaataacagagagtagacctgaatcggtgttaacaggcaaaaaaaatagagatttaatgcgatacaaatccagcaagactctaaaaaaagatgtaaaagttgacaacaatataataaaatactctgcggagatcccagagaatccagatatactggataaattggaggatcagagtcttggcactatgaatcgggcatctgctaatcgatccttaaaacaaatgtgctttgaaggaataaaacctatgttaccgtctcttacggataaaccatttaacaataaggattggatatttgaaataaagtgggatggggtaagggctatcactcttgtggataggttaaataaaacttgcacgattaaatcacgtgtaggtgatattattactcaacgctatcctgaacttgagaacacttttaaaagtgccctaaaagaagatatgttcaaagactttgtcatattggatggggaaatcgttattttagataatgatggataccccgattttcaaaaccatcaaaaaaggatgaatgttgattctataaagagtattgaaattttgtctgaacaatatccggcagtttattatgtgttcgacatattatatttagacaataataacctcatgcagataccatttgcagaaagaagaaagatactagtcaacctggttaagaaagagaactcaaaaatacgaatatctgactttgtcgaggaatttgggatagatgtttttcagaccataaagaggatgagcttggaagggataattggaaaacagaggaacagcaagtatcattctggtatccgtacaagagactggcttaaaataaaaaatatcaaaacccaggactgtttggtgataggctatacaagaggtgaaggcaaccgaaagaattattttggatctctcttacttgcagcaatcgataatactcaaaacgatattcatactaataccaataataataatgacaattccaaaaataacattagtaacttacgattcataggtcatacgggtagtggatttagttttgaaagcctctccttaattcataaaaaactaagagaaatagaaattccatattgtcctgttgattacattccatatcttaacagggaaacagtatgggtaagacccataacagtagtagaagtgaaattcaataattggacctgtaacaagataatgcgggcacctatatttctaagaattagagaagacaagccgccataccaatgtgtcattgaaatttcaagtcttacaaattcaaagtttgcagataccatagagaaggatgaagatgataatgacttaaaattaaccaataataagaacggtgttcccataactaaacttgaccaacaattttccaatttgaaaaaggagttttggagcgcaacaaaatatcgtccacctattacaaaaggagatttaatggagtactacgataaaataagcgaacttctactaccttatcttaaagaccggcccatctctcttagtaggtatccagatggaatatatggaaaagcattttatcaaaaggattggaaaaatataaaaccacattatgttagaacagtaaaggtatattcagaatcaaataatgatgagatcaactatatagtatgtaataacaaggaaactttactatggcttgtgaatttgggatgtattgaaatacatccatggaatagtcgggttaatgattatgatcaatgcaataaaatggatgtaatagaaacggaagaatgtggattaaattatccagattttatagtttttgatttggatccatacataaacattgataaaaaaaatgaatcaaaggaaccagcctatagtttagctgcttttagaacgacagttgaaattgctctagatttggaagatatttttaatgaattgaatataaaatcatatgttaaaacttctggaaaaacaggattgcacatattcctaccagtaattaacatgtatacatacaagcaaacgagggaatttgccagagtaatatctcaaatcctgaataaacgcaatgccggtcaaattactacagaatggaaaacaacggatagaaaaggaaaagtatttttagattataatcaaaattctattgggaaaacactggcgtctgttttttcaacaagaccggtagaagatgcgacggtttcagttccactaacatgggaagacctggtagacattatccctaccgattttacaataaatacagtacctgacctttataagagaaaaatagatccatggaaggatattttatcacacaagcaaaatcttgaagaaattcttgaacacatttccgatttcaaagtttaagaaaaatatagcagcctgtcaataactaacttcattaaaaagatgtactattacatcaattcttcttctaaggcagatatacccggcaagatttttttgttcatattttgcattagttcttgacagttttgcttctttgaacacttgctttcaaagcctccaataggttattactagtatccactaagccttctttttcttcagttttgtatgtgatccctttagattttgcagttaccattttttctaattgttttgtatattcatccgaatattgtgtctggtcaaattgtgaactagtcaaatttcctattaacattctcccaagttccaattctttctcatctataggtaccgaagatgcagaagattcagaccccggcattccgtctatttcatctattggtgttatctcttcttggtacatcagttgatgcattaccatacccctttgatatggacgaatggcgaccacatgttctctatcttttaacacaacctttcctatcgcgattttatctgtttctttaagggaactaacaaataatctataggccttggtagaagccgatacaacactttctttttgtttgctttttctttttccacttgttttatccgtaaaaggggagacataataactcttttcgataagaatagtgtcaaaatctttgatgtcaataaattctttgatgtcaattgttttagtagtttctggttgaattttatccaaatcttctttttctattattatatattcgtcctttgcaatcttgtaccctttttttatctcttcatacgggatttctttttcctctattggacaccatcttttatactgaattttatgtcctttttcatccaactggttaaacgaatattcgttactgctatcagatactgtaaataactttattggaatgtttactaacccaaatgaaatgctgccgttccaaatacttctggttcccacaagtaatctaaaacaacatgactatatgcgtatttatagcaatacatacattatcattttattttgaattagtatttttttacaaaagatagtaagtagctttttgtcgtcattttttatttaagagataattggaaccgtcctatagtagaaaggcaatacgaccaatatgcttccgtatgatccatatcatggatgaatttctatccatcttctattctattttcatttggaactttgtcattacgatcgcaaacgcattcaaaaatcaagaggaaaggtatgtaacaggtccatgtatatcatttatcaagggacgcgagtaaagcggtattgtcaaatagtagatggatgaaaaacaaaggatagtatctaatggaaatagatgaacaagataactatcgtctggtagtaacgacggagcaacccactatttactatcctttgtcgttgaaacttgtttctctaatactgtagtagcagtcattctagtggtaatgagtgcaacatgtatctagattctgattcacaaaaacctagcttctgaagaatcaatattattatagtccggcagtaatagttattaaatttctttacatcttttatatattctatgatggtctttaacaggaaatccattagattaacatcaatgggctgagataatttccaaacaccagactcaaccaagatgagtgatgaagaaattagaaaatatatgaaagcagcaatatattatatttttactttaaatagcaagtttgctctaaattagtagagaataagagcaaatatgattgttaattaaataaaaaaagtgtgatcatatctcttcttcatatggtagtagtcttaaattcactttgatcatagattctaacatatcaggagagtctagaaattctaagtttctcattttttattgccgttatgttattattgaaagcatgtgctagctcagctaacattgtggtaatccgtaaataactaaaataaaagtaatatttgataagaactttaccttctattgttttttatcctagtgttaaagcctcttgtcataaagtcatattactatcagttgagatacttgcggactcttggagatccttttgaatattggaaatactattagattgattagaatactctttgactccaagattgtctggtgttaaattactaaacaaatagttgatgtcttcagacatgttttggaggacgagaccgtcggaaccgaaggaattcatcgagatcaatattggcaatatcatcaaaatgactgcatattgtatcatcaatataatatttcattaaagactaaaatacatagtcaaatatttactagttaaattcttgtgaaataatcgtacaaaaaggttaagtcatggtttcagaaatgttagaaatcataaaagaatatagtgacagtagaataccaaactaaattctaatcatttttgaatacttgatttctttgatgtgattgagaattagtattagatggatcatgtaattgtctattggctaggctgattgaactaatcataaaaccacgattgattagaatactttaatccaacaaaatctaaatttaatcaaattacaatattgagaaatccaaaagtcaagtagaattagttatttccaatggtttctgttatctaggaaaatttgaccatattgctctgctatgtttgattctgttttgtaagaaaccttgcctttgccaaataattcaccaaccttgaaaaaataatgctctagttcgggaggactcattataagagcgtgtccacctttgcggcctacctcaaatctatgtggagttccttttggaacaaaaattgtatcccctgatttaccaattaacgatttttcacccgacataaattcatattcgccttcaattatgtaaaaagtctcagggcccattggatgcatatgtaacgcaggacccaagtaaggtgggtggattacatccattaccgtatattttccatttgtctcagaagtgagaacctttatagtaaatattgcaccatgaaaattgaatggttaatccttcacaagagctattttggattctagggcttatattttttaatttcgacgatagttatctgtgcaataattatttgtcttgcatcatgtaaccacagagtaaaaggatattgatgcacaagaaaatcaaaaattgatagaattcaaatccttcttagaaagtagcagcttggtatttttttagttaattgtctctttaattatttttatacttatgatgagttcttgataaacctagtatgatcctgtcttgataaagatctcggttgttatgtttatctcatcaaagtgaagtataagaatacaaaatgtcctaacagttaatcacaatacagttgatgcggttctacattcaaattttgttattttgattaatacatttaatttgcaattgtcactcattggcaatataataaaacatatttatattatcttaatcataacagatgagtaaatgcgattagcctcgttcaatgtagaaaatatgtttgaaaggccttcggtaatgaatttgccatcatgggaagatggtaaaacagtgttaaaggattttgatgatttaattaatttgatccaaaacaagatatactctgaacaaatcaaaaaggaaatactgcaaataatgaaacgaaatacggggttactaacaaaaggtgaaagtaaattcattcgtcttgtagaagtccgagcaaagctagttaaaaagcaacaaggtgtatatgtcgtcttagcaaaagggcgagatgattggataggatggtttgagctcaaaaaagataccatcaaagaattagccattgaaaatactgcgagagttattaatgaattaaaagcagatattttatgtgtagttgaagcagaaaataggattgcactaaagcggttcaatgatatggtgataccaaaggtaaatgggcagccatacgatcacactatgcttatagacggcaatgatgaacgaggtattgatgttggtattatcagtagaaaaggatttgaaataagatcgatgactagccatgtagatgatattgattcagacggattaatatttagtagagattgtgcagaatatcatttaactactccttcgggaaatgatctgttcttattaataaatcattttaagagtaaaggttttggtgctcaacaagacaatgacaaaaaacgtacacgtcaagcaaagaaagtcagaaagatttatgacgaattaaataaaaaatttgattttattgctgttataggagacttgaacgatactcctgatagtgctcctttacgtactctactaggtagtaactccaatttattagatattatgaaacatgaaaaatttgtgggagatgatagaccaggcacccatggtaatggaacaaaatcaggaaaattagattatatattaatgtctccagaattggccaaaaaggctaaacttggtggaattgagagaagaggtgtgtggggaggtaaaaacggtgatctttttgcccattttcctgagatgaaaaccgctaaagatgcaccctcggatcatgctgccttatgggttgatcttgatatttgacatcgaagatcgacttcatctttattaatatctaacatatcaaaaatattcccttaactctaaaaaactgacatatttttacttttacttttactttttatcggaacctgttactagagacgcagcaccaagatattaaggtgaagtcattttcatactaaatatgaagattgagacctcaaaataattctatcattattgttagatttgtatcgaaaaatttttctaatttttactatgatttcttatttcttaattcttaattcttttatgatttcttgttatgaactgtcaagaaatattggtaaataatttttgtatttgcttctttacgtcttttggcatattaggatcttcaattatcatgtgaaggtcagtcctagtaatacaaagtccattcttatctattttgtaaaaccattcgatatcgtcagggcttagcatgtctatttgtttattgcatcctcgcattccacaaatggttagttcatctttactaaaacaaatgtgtccaaccgggcattcaaagatcatataatggttatacattcgacacatgtaaaaatatttattttgttccatgctcgatcttgtcgttttattatatccatatttgactatgtgatgtagttcatctaatatattcagttcataatttcataattatattacatcatactaaagcagaaaaaaatagcagtgttattttaacaaattcaaatatttaagattcgcattgaagtatataagtcaaatattgtctgcatgaagctgcaggtcgattgtagcaagaattagttcgtgccaagagacattggggtaagtggtcaatatttgttattcgttcattcactattttttgttactgtaattcgtttgaattctataaaaagtagtatgttatgatggtcacttcttaagtatttcaaatgaaaggtgatctctcagtacacatgagtaaatactaaatttttgtatactttaccaaatgtagttatattaaagggtcgaatcgaatgtaaaggtaaaggtagtacaagtacttggttgtagaaatttttcaggtagttcttgaattattcggttggtagctttccatcccgtgcagtgacaagggatcaaatatcttggatctatcttttttaattctgttattgttggttcgattgcatcctcataaatgcctccaccagttagatgaaaacccccgatcactgcatatatcttgttgattccagtaagcaatttggcgtatttaattgtattaataatacccgcatgtgcacatccactaatgattatcaatcctttgttcttgatatttgcgacaatagcttgatcatcatttactaaaggatcgggaataagggtacttgtattgaggtcttctttgtactgcaatggaaatcccttttcgtaagtagtcgttcgtggaatccaaccagtaactagtaatttaggtattgaattgtcaacaacagtgtagtcgttcaaggggtattgatattcttctattctgtcttgagaaattaaactggggtctttttttgtcattataactgctccttgtcttcgtaattcctctttatcgagaaatggcaatcttgccttatccttgccattggggaatattatccatcttctcaaaaaggcatcgggatggcaaattaatctaacaggcttgtctatttttttgaggatacttaataggccagtaaagtgatcgaaatgtccatgactaagtatgatagaatttatggaattgaggtttattcctaatatttcagcgttagataaaacaccattttcactggttccacaatcaaatagaattacgttttcattgagtgattggtctttgttttgatatgtcatatagtcattagatatagctctaatcagagctgaaaaaccatgctccgccacgggtggaggaggaggaagaaattgttcatttttcatcatgggtgggcgaattgcaattaacgatgatggtaacaacctgtcagtataattatccactaataaggtgatcgataaactgtcaatttcagggagtgtcacacacacaaatgagagtctaatgaaaaaaaagttttctattaaattgattcaaaaaaatctgatctgtatactttgtatcgattctattttcttgatatcaaaatattgaagctcttgtttctaatatttggaaaaaacctcttaaattcctattcaaatattctctttctattcaaattctaaaatggctagagactaattagtgcaatcagatggcaattctaatatatttttctatgatgtccatgatatgaatagacccccccctccaaaacgacaaccaaaataatgaaattgagaactacaatgatgacaataacaaaaaagaatatcaccatccattctatcctgtacttacaactaattacaggaagaagttgagtaaacaatgcccctcattcttgatttttttaactgtagcaacataagtttggaaagtttttgaacaaaaagtgcagaatagaatgtagtgtagtttataaaaatgaagaattatgaattcgtccggatgtggatattatttcacttagggtatgtaaaatcaacggaaaaggcctcagaacctgatgaggtccattcattcactttgattgacgtctggcgattgctaaagttaagtttagtttatgactatccaacaattcttgaattgtggaatctctcggaggacttgcaacgtgatggtctaattcatatcgatgaggatgtcgtcctatctaaatcacatctatctatttcctctgaaggtttgtcatttcttataaatgtcttaaaagaatcaaagacaaatagtgatgtaaatagaatcaaggaaatattgtacgaattgtgggctcgtgaggcaagactaaagaaaccttttgcgtcttttagccttatttcgaaagaagccattaaagaaagactagaaaaatttttgagagagattgaacaagggaaaaaataattgaatatataataaaagaacatgatgaatcaatttaactgattccaatgattatggatatcgatctagtagtaggcttcactatgtatttggtgttctttccacatttgccttacctatagcactttactgggccaccgtgccataacagtatttatagatgtcaaaattaaaggacaaatcaaattgagattttccattttgttatcatagtaggattcaatcgatctattttatgatatgaaaataatatgtgagaatgaattactttgataaaggaatggaattatggaatagtaaccatgaatacggaatatacactttcaaaatagtagatgagcatttccccttcttagaggaggttttcttttgatatgtccttattaactgatacatttactacttccttaactctaccaattattccatcttctaaaattactttgattccgtggggatgaaatttggatttggtcaatatttcctttacttttccttcacttacctttcctgtcttttggtcgcttttttttatcactcttactgttgatccaattttgatagtttctctgttattcccagacaatgatatatttattatattatcacatataaaagaaattaagtgagtctatctatgggattattgtaagcagactttagttgataaattattttgttcataatgaccaagccactcaaaagttataatcatgaatgatccgaatcatttctatagtattttaaaatttcctcggttttattgtcttcatttacatctttatccgaatccgtatcagagattagactaaattttataaaatctgttgtagtgattattcctatcggtttaatgagatctttatcttctaacgcgtcattattatccatgttttgttttgaatctttagatatgacgagtaaatgtcttaccttgttctttaacatcaagtctgctgcctctgaagatgataaatccgcattaacagtaattagaggaaatgacattacttggcttgctaataattgagtactattcttgtcagtaacgcacacttttctcgcaaggtccctctcggtgacaattcctagaggtatgccgaatctatcatccatcactacaattgaactaacctgtttatccctcatctttatggcgacctcctgtgcagaggaggtagatccgacagtttcgagtttttttgtcattattttactaattttagttgccccttgggttggcattggcatatacaaagatcaaactgtatccgttggtataaatgcattaacttcatttcttttacaaacttgtacaatactgtgattatttattttcattctacaattaattccatctggatatatccgtcacaaatgtttaaatgatatattcaaattaaattagatcaaattaaattaaattaaatatcgacctgcaatctattgtgtatcaaaaattgttcggtacatgaagaacataataagagaaggctttattttaaatccaaaccgaaatccaaatgatacaataattaaaaatagtaattaggactgttatgaaattctcccttgctgagtgataatataaaaatctgaacacttatgataagcaagtatttctctttctgacgtcaataggtagacgaatacctactaattactttcaggacatacccttttatcaatctaatcatttaacagcatttgcaatcttgtttagtgcttcatctacagagttacttataccgtcttttgcgaatccctttccaatgctaggtattttagacatgtctagattccatattatgctaacttcggtcttattggagtcactcccctcctgttgtaaagatatggttttaaccccagtaacagcgccttgagtttgattttcaacaattgtaaattgttgtggaataatggttattatttgatgagctttattatccataaagggcggtgcaggaacagtaacttctctttctacagtgttgtctgatttgctaatgttttttacaatcgaaatcggccaataatctggattcttgtccacttttgaaatgatattccacactttatcctttgaagcattgactacctttgtagcattgatggtgtctgtttgctctgcataagctgtcatagtagtagtagtagtgctactgctaggtccagagaataaaacaagtagtgttgaaaatgcaataattgctactgttgttagtgataccttagtggcagtagctcttacagatttttctattcttaatttttgtgattttatcatcctgaaaatattatatttgattatattaacgatgctggacctttgagacgtaactttgttcccttatgattttatacgtatcctgtttgttatactatgtttatacgatgaaaaagtacatacatatgaatatattcgcagaatggtcaaacgataccctaattggacatatgaaaacattttgtctgttctgattgattcattgtggttcatgaataccgtgatcgaatatttatcaggaaggatattctcttgaaactttgtgaatatggtgaaattaatcagagtaagcttatgagttactgtggtttgaataatgttaaacataaagaaatcttggacgatatggtcagaaaagaattgatcaatagaatggaagaaaattggggtagcaaagtcataatcaactacaaagtctcagaaagaggaagattaatcttgaatgaaattctggcaccttatgaagaactatttccaagaaataatgaaaaggagaggcgagactaatgaaaaaatcaaacaataatgataatgaagacaacaatgacaacaaaaataattctgataacaacaatacaagatcagattctagtattttttacataatggatgggataattgatcaactaaataaaaccaagaaacttttcattataatgttactaactattatgatcattcctccgatagcgtttatattaacattcatgttatttggatttccgtttcatgatgatggctataataattggacaagaaatggtcattggggaaatgactccaattctgcttctaattctggatttaactcctcttttagatacctgccactaattcctgtaattgtttttatcgtgtggatgggcatagggatcaggcagtggtttgttctttcaaaatgggacaagaaatacaagaaatatagagaattacagaaaaaaattgacaaagatttgggcaaagatgatacctaaaggtcatactgctagaaatcaattcaataaaagcactgagatcgtagtcgaagttttaacaatggtgataggtcatgatatgaacttccacaattatagactcaaggcaataactaacatcgaactttatacaaagtatctaattaaataatttagatccgatcaatcatattttcatgcggagctaatgtgggttactttgtattcatattaatatatttatttattttttagacattcgttacaaacccaaacattgtcgacatattttccttctttaatttggccttctttttctacttctggttctatgtgatcactaacgaagctaccacatttactacaagtaggtattaaatttttgaccatgtttatttttgagataggatgcttcttaaaagttttggtagataagaattacgcgatttagtcaaaccatgtgtttgatatatcaatgtcatcaaatggaacaatccaaatatggtataattcattaatttgagtggcgaaaaaacgcataataaaaattgtttgacgataatctgtcaatctaagattagataattgtccgcaattgtaaaaaattttgttcattatttgcctattaggagttgttcttttcagtctaattctaaaactgctagaatattagagtattgcacctagttagcaatcccaatatatttttttcatagtatcaaaggtatgaataaaacaaatattcacaaccaaaacaaaatcaaaaacaaaaacagcaaaatctttgtcgcatcaattgcaatagtggtagcattaaccctatttgtcagtccaatactcaatgtagatgatgctttagccacacacaacaagaaaaataaagcaaaacagtccatagaccaatcacaatcgtcaaaccaaaatgctggatgtgtatcaggtggaacaacctttctatcatgcaacaaccttagtttccaacaccaaaagaacagtggaaacaacgcattagcacaaggtggacaggatggaaactctgcagaacaaagcatcagccaatctcaatcctccagccaaaacagccaagtagtatcaggtgcagatacaataggttctggtaacaacatcaacgtccaaagtcaagaaaatacaggaagtaacgcattagcacaaggataaataaccttctcctcctttttttctatttagtcatttgatactacaaatataacatattgtatgcctatgaatctaatacccgttaacattttctctcaactatagaagattattttagattttcctttttttagatgtagcgacatatgttttctagaatatttaccataaaagctctgagtctgagtccatctaaacaaaatattatacataacctaaaaaataactttgattcatgatctaggttgacaaaaggaccaagatatgtaataatagatgccccttcaacacttggattacgaaatacgggagtacaaaatcttccgaaggcattgaagaacgcagggttaatggatagattaaatgctacttttgctggtcgtgttcaaccatcaatgcattatgatccaatacgagaccctatcacacatctgttgaatggcacttctattgcgttattttcaaaagacctttctaaaatagtaaatattgaaatagaaaaaaagaattttccgatcgttttaggaggtgattgcagcattctcattggcgtccatttaggattgagaaaaattggaagatatggattattttttattgacggacattctgatttttatcaacctcgggcatcaacaactggggaagttgctgatatggaattatctgttgtgtcaggcagaggggcaaatattctttctaatattgacggcctgaaaccacttgttctggataacgatatcgttgtttttggatatcgtgatgctgaacaatcaatgagttacggaagtaatgatgtacgaaataccagaatgcaggtattggatctttctgctgtacgaaatttaggaataaaaaaggccgcctctctggcggtttcaaattttctaacgagtgaggatttgtcgggtttttggattcatttagatgctgatgtattggatgacagaataatgcccgcggttgactataggttgggtaatggggggctagaattttccgaattatcctaccttctaaaaatcctcatttcgtctcaaaaggcaattggaatgaccataactatctataatccaaatctagatgctagcggttctattgcaaaaaactttgtatcatgtattgccaaggggttattatgagatgaaccatatttacaaaatttttcaaatattttattttttctaattgggatggtttccattttttgatttattatatcaactgcactgcaggaacacttaatcatattactcatatttgagtatctacgtgaagttgatcaacgtcttttttcccaagtagtagatagaaaagtatgaaatttcaataaggtcttacaggtaaaacgcaagaccttatagggaggatattgtcgtgagttttagtgttcattgaacatattaaaaactttttgaaatctaattttaggtttaacacaagattcatcaagaatttaagaataaaacccagttggtatgattgttgttagttaaacttttcaggaataaaataatatatatatcaaagaatttgcataagactcaagaaatttcatggtacaaaataagaattctggtaaacatattgtcgttcttacattcgttggagtttaataaggtattagatttcaatgaggaggaatagatattttatagctgaatcggataaataaaataaggaaaattttaagaattaattagtcaagtgatcatcgactacttttatagttttcagcaaatgtaaatcagacggagaaggatattgattagagccttccatgtttaaaatagctaaggtagttaaagtgaataatctctataccattttgatctgttatcgtaatcgacttttcttttgcatcatgtaaaaaattaagatacaaaaggttaccacccgatttttcatattcattacgatgggattttctatcatcattagatggacgaagaactaagatctccttgtcgaaatcgattattaattcatgtgttaaaccttcaaagaaaaaataaataaaaggcgaattggcatccagaaattcccgcatccgcatagggttatcagacatacagagtatttagaatcaagctaattaattatttactatagtgaaaatgaatttagtatcttattgtattattgggagataggattaaaattctaaaaaagtactatcatccacgacaaagtccgttttgtagagatatgggtgaagagataagggagcaaaaattagctagtttgcgggttttaaaggatatttccatttctttaatgatgtttttagaatgagccttacgttagtatggaacataaattgcattcatagtctaaattgcattcgcaacacatgcccttttaaatctttgaactattgttgtgactatacttttgatcccttgcacacttttatattttcaacttatatctttcttgatgaatgaatcaaatgtatcaaaaataggtgaagagaaatcaagtcatatacagaaaattactccgtttctttggttcgataatcaagctgaacaagcagcaaatttttatgtctcagttttcaaaaactctaaaatgggtcaagttacccgatatggaaaagaaggatatgagattcacggcatggaagaaggtactgtaatgacagtaaattttgatatagaaaatcaaaaatttatggccctcaatggtggtccagtgttcaaattcaacgaagccatttcgtttcaagtattatgtgacactcaaaaagaactggactattattgggagaaactgtcagaagacggagacaaaaacgcacagcaatgtggttggctcaaggacaaatatggggtttcttggcaaatagtacctaaggtgctgtctaaaatgatacaagacaaggatcaaataaaatcgcaaagggtgatgaaagcaatgcttcaaatgcaaaagctcgatatacaaactttaattcaagcttatgagaaaaaataggatcaatttagttttatgaaaaatttgaaaattctgtttccttttttatctcgtgtagaataattagagatagttatcgttattgaatttgcgatcaagacaggtttatctcatcaataacatttgggattttatctttctttacacctttctattgatcttacattaatttatgataggttgtcaagctcctgttatgaacatgtctgtaaaaatattaaaagttgatcaagataaatactcgttgccaaactgtaaggttctttaagcgtccgattataataatcctgttctgaacatataactatctaaatcttaatcatttctcatatcaatcaaaagatcctaaatacccataaagttacagaatcgatcctcgtcaggtggaatttattgttatatttatttttcaaaaatatcaattaacatcgtaactattaggaaatatagtttgaaaattacatatcgtcgatcaaatggccatctgttcgaccctttgttttaaggcctcattcattttcgtaaaactttgatacatatctttatccaaactatttcctacgataccgacaagaatccccgtaaagacctctttatgtacaaagtgcacgtgatttgtttcaaacgaatcaattgtaaaaatacgttctccattgaaaaatcctggtatgaatgattttccataccaacgaagctcatgatcaggttctaccttagttacggttggttgataatttctattctttccacctgacgtgtgaagatatattttgagctttgcgccaacaatcggtgttccctcgatttgacgaataaaagggttccactgtggaaagttcttaaaatctgttagtatttcccatgtcttactagcagatgcgctaatatcgatctctgtaagaatttctttcaacttacattatagtgataaaagtagttgtttatactttcttgatgatatacctgtgctagtagaaattagttgttcggcttaaatgtctgctcattccattatggatcggaggatgaattgacgatggtattttttaagttatattttgtaattgattttttagatattattgctaacaaccatattagatttgtcaacttaatctactagaaataatcaaaacaaaacatattttagtagcgcaatgaccgcatactacatttttgctcaaatagactaattgatgtgtctctaatttcacgaactttcctaaaataccctaaaatgcctttatagaacattattgtagctgcctactcagatacagatacaaccataatcataattggaataggatttcatttaaggatattgacataaaaaatagaatgtccgccgagtttaatttcatagatttactcaaggatgtcttaatctaatccgggagcaattaacacatttttcactagtcgtggaagattactaaagaatttctggtctgtattaaatacagcttcaaggacctcgtcagaatatgagctgaggccaccaaccagtcctataaactctggattttcattacctaaaaaggaagctacagtaccattatttacatcatctgatttctctagataatggaaatatcctgcaggaacaaaaaagacttgacctttaccaatttcggatgtctctatctccttattagaaccatatacggtaaatcgaacttttccttctatcacgtagttcaactctcccgcatttggatgccagtgaggttcgcgaactccacctttttccatgcgaagtaagactgctcccatcccctttaaaactggaaagttatctgcatttattaccgttctgttaccgtgtggcatagagaattgaggttttgttccatccaaatcaaaaatgatagaagacttgtgatcattcatttgcaatttttgttgataatcttaataaattttattatgagatcttgatattagctgaccatttctgataaatctcaacagtacttttaatatgtttatgaaggtactcatctttttaaaacatagtagtattttagaatattaaatcataatttgtttagagactaagaaatgatctagagtattaacatggatcataatccaccgactgttaaacatatactggacacatgataactagtcattttgattaatattttcataaagtctcataaaactgtctactacagtgcgtttatagcatctatgttcttcctaattcatatggacatatacgggatagaaaaataatcctaagtagatttttgtacatattttgatgtattattatgtataccatgaatcctatgatacaaataaacataagaaggaaaattgtatgcacgcatacaagcagcttcatcttgaaacactcgttatgtttcaccatattgactaaaataatatgacggaatctctaaagatcaaactttgaattaatgctaatgccgatactgattggacaatatcaccttgatttttatcgataaatggagatggaccgacttaagcattcaattgaggtgaaaattctgttccaataaagtgaaacgattaattaatgatttatgttactctggtattatttgacaagaaaaaccattaaagaattaatacattttcgcataattttcacacatgtgattcaggcaatattggttaagaaaaagaacaaaccaaatcaactaagaatgatacttgtttgagtcgttttgttaaatacatttgtgatcttgaaatcaaagttcctcactatagagaccaagaaatgagtttattgtctatggcaataaacctttaatcctcatttctattggactatacggttgcagtgaacaccttagccgtatagataaaatctttccgacttggtataaataggatattcaataatgttatatcaaaaaataaataaaatatttatatacatactatactattctttgttcgtacccttgctagctaattgccattatttcaagactttgtaactggtattgtgatgtttgtttaacaattcaagttttgagtatagcagtatcattaaaattattctgtgacctatatgtaagcgcacattaaccgttgacatgttagccatcttgtactttgatattaaattagacggtcatcgcaatcttgcgaataaaccattatttaactttggtaattacccaaaccctttctccaattgacactttttatcacattagttgacgacttggaatcattccgtacaataaatagaaatcaagttttaccagtctaattcaaacattatcggatttacaaaatagttaaaagcaataatatgtttttattcttgatgaaaaaatctaccataattactttactagcaatttttatatttccctccttcttgatagcgtctacaccgacaacccatgctcaacaaagtaccggtttatccgctatgactttggtgagttttggggacaataattcatctaccggcgcaaatcttcaatcaatagaaaacaagacggtaacgtattttggaggaaacaccacaggctatttggtttatccaaaccaaaaccaaagcggcgaaaaagcagtacttcctgctgtcattctgatccatgaaaacaagggattgaatgactttatcaaagaatccgccaatctgcttgccaaaaacggatatgtggtattagctgtggatctttttaatggcgaagtcgtcaccaacaattcaggacgctcaggagaactaactggggcgattagggaaaatccagacattgcgatagaaaacatgaaagcagctgtaaattatttgaaatcccttgacaatgtcgacccgtcaaagatagcatccctgggttggtgctttggtggtcaacaatcattgcaattagccctcaacagcaaggatgatcctcttgccgccacaattatctactacggtagactaaccaatgattcccaagcgatttcgaatattacatcaccagttctaggaatatttggagggaaggaccagtcaatttcggttgactctgtcaagcagttccaaaaggctttaaatgatactggagtgccaaatgagatctatgtttatcctaatgttggtcatgcctttgcaaatccatctaatgataattacgccccaacagagacagcagatgcatggaaaaaaactctagactttttaggtaagtatttacaaagctagttggacccgaaaagacaaaattattgaatcattcaataatttttgttccatactttttattccgataatcattaatggtaatagttcatctaatatttcttcacatttttgtagcagcttttttaaatctacatttataatctgattttttggtagtacgggatctaatattatctaccttcttatatcgtgtcacattgaaccttttggaaaaatatgagtggaattatgatcgtaatcaagagaaaacgaggggtatagggtcattcctccatcaactatcacagtgcttccagttatgtagctagccttattggatgcaagaaattccaccacgtttgctacttcttcgtcctttcctattctacccatgggtatttttcttaaggtgttttcacgttcctgagcatcagtacgtaaattaatattcatatccgtgtctatcgcacctggtgcgacaatgtttactcgtatgttttcagtagccaactctagtgccatggtttttgtcatcatatcgattccaccttttgcggttgcatatggtacataatggggtcttggaataatctggtgaacagaagatatgttaattatacatccgccgcgaggattattttgtaccttcatttgtttaactgcttctctactgcagatgaaaggaccagtaagatctactgatataatattataccaatcctgaagagttgtttcagtcagtggaatttctttttgaattcctgcattattaactaatacatccaatctttgaaatttatctactgtgtcatcaatcaatcttatacagtctttctcttgtgcaacgtctcctgggatagcaattgaatcacatttagtggttttttttatttcttgtactactagttcagcttcatctatacttcttgaattaattactatagatgaataatccttcgattttgcaaaatttaaggcaatagccctgcctattcccttactcgaacctgttattactgctaccctttctcccgactttgatatgctttcattatcttgattattgttattcatgttatgctgtgtgatattaatgaaaggtattttaaaatgatcaggatggaatctagatttaataaacataatacgatataagaaaaaaattatcaatacatacaagtcgaataaattatttggacgtattgttgactgtcaatcacttgtccctgaacttagtcagtcatcatacaataattcacagcaagttggatttaataagaatatgtcaaaaatgaagcataatagttttagagacatactaaatatggtggaatagatttaacctgaagaataataatcgcaatataaaaaacaacatgaagaagtgaatatttgtaccaaagatttacctggtcatatggcatattccaattctaaaattcaacggtccctgctgaattgagcatcttgaaacaatgaaaacttatgaaattgaatgtccaaagtaaataatttctttatttataattatatctttatatttttgaacaatattatcttgaaatgttctcacaatacctaatattggggtaaaattatctaaccatacatttgattgagtgggattgacttgacagatgatattcgccacaaggtatcttatttttctaccttggttgagacatgtgaatccatacggattacgacaagcaagaataaaaaagtcgatttaatcgtacaatatatttcaggcttggatgaagattctctacctattgcagttctatttttgtctggaaagattttcccaaggggatcaattcagaatctaaatgtagggtttagaacaatactacagtctctgttagaaatctctagattagataagacagatgttatgcgaattcatttagaacacggcgatatgggaaccatagccgagtatgcaatttctaaaaaaaagatagtaacacttttcaataccgtagaaactctggaagaaaaaccaaccttaaaggaaatatatgatcagtttaaaagaatagcaaatcttggaggtccacggtctaacaacgacaaaaaaaatatcttaaaaggattacttttgagatgctcacctttggaggctaagtaccttgtaaaaataatatcaaatgaaatgcggataggttcctatgatggccttatagaaatagccattgcaaaagcatttgaaaaaaatattgaaagtattcgggaagcaatgctgatgtccggtgatattgcaaatgtagctttattgtcgaaaagagataaattgaacttagtaacgattaaaccatttgttcctatgagtttcatgttggcggatgtcatgtttactgcagatgagattgtcaaatattttgataggccccttctttgtgaatacaaatatgatggtatcagagtacaattgcacaaattcgggaaggtttgcaaactctactctcgcaatcttgctgatatttcatatgcatttccagaattaactaattctgcgttggatgtacgaagaaaaaaattaaaaacaagtcaaaaaaagcataatattctttctgataaaagtgatgtcagtgatatcgatcgtgacgatataaatttcattttggatggtgaactaatagctttcaaaaatgatagaccattaccatttcaagaactacaaaaacggttgagaagaaaaagcatgacaaactccattttatctgaaataccagtttgttatattgtatatgatgtaatgctctatgatcaaagacaggtaatcaaagatactcttgaatctagaaagagattattggaaaattttcagtttaaagattctattatttctattgctcaaagcaagttagtttcatctgtagatgaaataaccaatagatttcgaaaaagtagaaatgaagggcatgagggcttggtctttaaagatcctttatcgcagtattatcctggtaaaagaggaaaatattggataaaattgaaggaggagttagatacgattgatgcggttgtagtaattgctgaatatggtcatggaaaacgagcaggaacactctcagattatactttggcagtaaaagattacaccactaattttgtcgacaacaaattagcatcggaaaatgggaataatgtttttggtgatctgaaaataatcggtaaggcatattcgggtctatccaataaagagattgattatatgaccgagaaattgaggtcaattataataagagatgaaggtagccagattattgtaagacctgaaattgttctagaggtttcttttgataccgttcaaaaaagcgatcgacacagcagtggatatgctttacgttttcctagaataaaaaatatcagatatgacaaagaactaaaggacattgatggattagaaaaaattgagtctacataccaaaatcaattccatataaaaaataacagtaaatcaaaaaatagttttaaagctgcctgatgcaacttacatgattaaaaagacttggcatatatctaccaatattagtggacattggttcgctgacaattgggacaccaaaaagtaggccttgttgttaattttctttctgatacaattttggtaccacatatccaacaaggttttccagatcttctaaatacccaatgcgttgtatcccacgagatcttttctttatccttgggctttcttattctaccattattttcataaccgtatttcaatatcctgggtacatccattacaagattattcaattcatccttagagactttcgtcactttttcaagaggatagatattatttaagaataaaatttctgatttatacttgttcccgattccactcaatattttctggtctaataagacatttgagattatcatttccgtatttttagattttgattttatgatgtccattactatatctttgtcataattagggctcaatgcatctgggcccaacgatacgataggttccgtagttgcaggatcattcaatgaaaattgtaatattggaccattaaactgaatcaaaaccttatccaaagtaataatggttaatctagtcctagagtctttcctcacatctgatacctcatctcttttaagttgaattttatctgtgtttttatgcgttctttttccataggaggaacgcggtggtgattttgcaatcccactttcatattcagttctttcataaattcgccattttccccacatcatcatgtgattccttagatacaccccagaagaaaatttaatgataatattttttccgaatgtcttcacatattcaatagaggatccgattattttatctctaagactgttgtcaattttgttatgcaaaatattgattattcttttacccgatagtgcattccatatcttgtctgcaacaatctttacttctggtccttcagacatgcttaacaaaaagaatgtctacattatagtttttattccgctattattttttttgattactgattattacatactgtggcaagtaatgtggtaatctgttactgttttgctattaaaatcaaatgggttggaaaatacaaattcttatcatttgtaaatacagctaatattgataattctaaaactgctagaatattagagtattgcatctagttagcaatcccaatatatttttttcatagtatcaaaggtatgaataaaacaaatattcacaaccaaaacaaaatcaaaaacaaaaacagcaaaatctttgtcgcatcaattgcaatagtggtagcattaaccctatttgtcagtccaatactcaatgtagatgatgctttagccacacacaacaagaaaaataaagcaaaacagtccatagaccaatcacaatcgtcaaaccaaaatgctggatgtgtatcaggtggaacaacctttctatcatgcaacaaccttagtttccaacaccaaaagaacagtggaaacaacgcattagcacaaggtggacaggatggaaactctgcagaacaaagcatcagccaatctcaatcctccagccaaaacagccaagtagtatcaggtgcagatacaataggttctggtaacaacatcaactttcaaaaccaagaaaactctggtagcaacgcagcagcacagagctaaaattaattttttacatttttattccttcttccagtttatttaatgattaaacaatctatcagtaattgcattttagagccctacttccattaggaactttttacatagttgtgatcttttggtttgtgatttacacataattaaatataggataacgtggccttatttgatgcttttatatttatgattgatatttagaggagcatgaataagactctgttaacatacacaatgatgctctttggacttggtctttccatgatatactatgatcaagttgcagttggccaaaatcttgatattgatgataatactggaccatttagctttttaaaaacaggaacaaactctcttaatatttcagaaccaatatatcaaaccatcattggaaatttcatagatacaaaagagctttccaatactcctacacttgtaacagaggaatcattcctcgaagaggcgattatgaaagacataggtaatgtaacaaacaggatgacctttatcaatacatatgatgctcaatcggctgcaatacagggaagaggcaacggaacgattgaaaccaaggatggtcaaagcataggatggatatctttggacgttggaatcctcagcgaaaaaggtcctgtctttcatggaataattctatttaatgacaccaatagtgaaaaactatcatttctaaatggtaaattaggaatatataaagatgctccggaaatccatagaactatttggttgttggactagctatcacctaataatttttactactctatcatgatatcgagtcctcttgatatggaaccctactaccacaaggaactcaatccccacatatgagaactgttcctaaaaacttatacaacttcttgaatcaaaagagaaagtttgtttgtttctatttgtagaattattcttttttatcctcttccttttctaagatttcctttttgattgatttgaatatttttttatccttttcttctggggtattttcagatattcctactaaatttgattcctcaaacgcaaattcattttctccgctgtcattaaccgatgacatatcaggaacttttatacaaaaaggatataactatctatgtctgagttttcttgaacttcagaagtcatcactttattgagattctattcaaccttgaatcgtatctccacatgtccgacaagtaattgagtttagcagacggaatggaatgagtaaattataaacgtatacgaaaacatccaaacccgttgtgagtaaatcaaggttatccatttcacagtggtgcataaagccttgcatctttgttcttataattatataagcgatgttttctaactcattgtatgtgctgtgattacgaaataccactagaagaagaagaacaggaaaaaacgatagaaaaagaaaagaaaataatccaaccacacttagaaatcagaaagacagaagaacccatagcagcctaaatttttctgtttttatgtatatgatgcgataatacattagtattatgctatagaacctaaccaccactgggaacttaatcccaaccaatgaggactgatattaatatagcatatagtccatcatatgatgatatttattatgtaaaatataaaaatctgtatcctcatatgtcgttaatatttaatcgtctttgaacatttcaatttccatagcctgtagcgttttccccattattactacatcaataacctgcaaactcttccacctagattatttcttttgtaatttttaatattttcagcataatgattgcttagctttcatcgtgctaggaggactgaaattgtagattattgaattgttaaataaaacagtctggagattcaaagatcattgctttatataccttccatactctcctatccaaccatttctattatctgatgagttctcttcatatttgtcttcactaacggtatgaactcttggtttttgtttaaggttgtcccatcctcaaactctttttgaaaaggatactataaggttactacctcattaccaataataaattaaatgttttattcatgctaattagacacaaactagtatttactttaagaaaaattagtcatatcaaatttaagctttgtcgtcacattaaatgagtcaacttgggtgtagggaggtattagtgttttgtcagatcgatttaatactgatagtaatctagatgttcatactaacgatagagcgaagactaaatccttaaaagcatttgattggataaaagcagcaaaaataataaaagaaaacagcattcaaaatgcaagcatgggattaggtgttactttagatgatactatctccatattacaaaatggaaaaccaataaaaattactgacaatatgtttttgtccagtgactctaatcctgtcctgataaacaatgatactggagaaatagtgaattgtttctttaacatcaatgagcaagatatggaatacaacaatctctatattccaagttcaacggaagtaacaaagttatcaggatggtcgaaatcagcactcgctattattaaagaggcgttttattataaaaatatcccggaaaacaaattttcacaggtttatttgctatgctcacttttctacttctggaggatattagagtgtgggtgtctttaacaattttcaatgctcatggataaatccataagtatctcgaccattatcatttacctatttgatcaggactgaccagttgtttgattatgtttattttttatgtatagaagttatggatcagtgtattagaacccactaccacaaggaacttaatccccacgggcacgcgataaatttgactaaattctctaactcgatatccgtacctacataacatgattataacatatcataaataatagaaatctgaaatggttaacccagattcatattcgtcgcactcaaatttaggatctagtatggagcaatacccagtggagaattccggatggtccgaaatagacgaatgggggcccgaaaaagtattgcaggtatatgatcctgacactggtatgaaaggtgttttggttatcgacaatacctctactggtcctggcaaaggaggaataaggtttgcggaaagtgttacccctatggaggtatttaagcttgcaagaacaatgacctggaaatgcgcatcggcgggactaccatttggtggtgctaaaggaggaattatagcaaacccaggtaaagtaaaccaagtagaatggattaaatcctttgccaaaatgataaaaccttattgcccctcccaatatattgcagctactgacgttggtacaaccgaattggatatggcagtatttgcacatgagatcggagatatgcgagcatgtactggtaagccgcaagaacttggaggaattcctcacgaactgggaacaactggatacggtgtgagtgtagcactaagaaccacaattgattttttaaaagaatccaaacgtaaaggattaaaaccttccaggccctttatagatctcacaaacagtttagatacaaaaaacaataatatcaaagtagttattcagggatttggtaatgtgggttcatttactgcaaaatttctaaatgatttaaatataaaagttataggcgttagcgatgtctcgggatttgtatttgatgataatggtttggatattccgcaattaatgagagatatgaaagacaagtccaagttaagtgatctgttagataatcaacaacaacagcagcaacatctttataatattttggataaagatgaaatttttaacgtagattcagatgtttttattcctgcagcactgaccggtgttatcaacgataagactgcatccaagttattagaacataatgtgaagatcattatagagggggcaaatattcctactactccatcagctgatcaatatttagtgaataataatattttaatcattccggattttcttgcaaattctggcggtgtaatcggatcatttgttgagtatcaaggtcgaacagaaaaagaagcctttgatctaattgaatataaaattgcaaataatgttaaaagggcactttacaactcagtacaattaacagaccaggaaggtgataattcacaacttaatgttagaaaggttgcgatggaaacagcaaaacaaatagtatatagagcaatgttattaagaaagggtgcaattagtgtcgcaagagaagcctatgcaagaaaagagcgagttaatttttaggtaaattaaattgttgttactgatacaagtagatgaacaaaattgtgatttaaatcaattcgatatattcaataaaatttatcaaaaaatttagttggtgttttattgtaatcgggatctttggagattcgattgacagaaagcatcggctagaagaaataaaaatactcaagtgaaaaaattatgatttctctatctgatttactttacaattgtctgtcaaattctccggttattacttttgaatcaggggaaagaagccttgtccattcttcataaccttgttgacattccttatcgttcgacatttttgcacaaagttcatctctatgtttcttatctttatacgacataatggttatccatacatcttcatctgtactagctgaaactgatttagaaatgttttcgaatccttcccaactagtatttactgcaagtcgaaataactcataatgtatttcctctttatcaaacatttcagatgactttttttcaagtgctgttaatgcttcgtaattcctttttggtgatcgtgcgatcataaattctgtataactatagttcttgttattaccttgttgattgttcatattatgcttcaaaattactctacattgaataaataaaaaggataactccccaaggggaggtttattaataaggaaaaaagttgttaattaatctgccaaaaccaaagcgaaataaaatggaattatattatgatatactcaaaggtattttagatgagctagttgacaatgagagtggttatggtaatagtaaagtaaaacccacacgagtacaacttaggagcaatcttgcatacgataaacttgccaagtatcttaatgaattagagagcaataagatgataataaaggatccacttcaaataactccaaaaggaagagattttttaaaggattttgaccgaattgcttcctttttgatagaaatgggtataagatactttgattcatcgaaagtagtggggttgagaaattaacaatgggtatgcatgatgataacgatggtgaaatttatcacccactgacatttgttgaccaattagaaaaaaacaaacatatagtgttattatatgatgaccaaaaatatgccttttggataatagctaggtattttctaaatggtcttaataagggtgaatcatgtattttctttacttcagataatccagatgaaatagaaaatagattaaacaaggaaggtattgatgtaagatattataaaaataataacttgttacgtatctataccattgaaagatcggattataataaacgggatactttaagcgtgcttaagcatataagaaaagatgccaccataggaatgaagcccccatttagatttgcaggaagaacaataacagatacagaaacaaaggaaggaatgaaactaggcattgttttggaaaaagttgggcatgaaaattttgacagttttaataattcacaaatgtgtttttatgatatctctaaaatagaaaaatcgatgagaccaagatggatccacgatcttttgaaagctcatcactgtgttatctacgcatcagaacctaataaagcagtagcatttaatactaatctacttgaggatgaagattaataataaaatataggactgaagtaccacattcaaccttttttgaattctttattggataaaattgaataagttttctataaaatattatttttgtatttgtcccgtcgagtattgccagagttcaaatccctctgccttgttgtgagaaaaagacaatacaaaaactaaacgacatagatcttaaataatctaccgtagttttcaaaaagcttaaatcatttatcctcataccggcgcctagaatcccatttaaaataccgatatcagtactaatccccacgaatgaatactacaattacttatccgagtattgacatgattaagttcaaaaataagaattacgcttgtatttaagatattcttaaatatttaattatttcatacattccgatgttaaaagatatccttgtttcacggaagatttatttcatgtcttattatgttatatttattttctttggagtttttgtgacaggcttcacagtattcaatgcggataatacactctcctttgcaagacatgatacaatggattctatttatcaggtaaaactaggagaatcttatgaaccaaaaattttgtctattaattatcaagttgaaccagcattttctaaaatttcaagtgtcaatcctactactaatagcggcagtaacagcagtattagtacatttagggacaactcagaatttagacaagacattagtggaaaatatacaaatcctaattatggtataacagaatttgaaatccccaccggctggtttgcaacagaaagtatgaatggcgataatggtattatccttactatgcttcccggaacaactgaagaatttttcacaaagttaaattctctgtctaacaatgagacactgcctgtaatgaatcttgttgtacaagataaggaagatctgagagaacgacaaatgtcatcttctttgtctgctgctgggccatcaaatctttccacggagtgtacagaattgacctccaattcgaccactatgataaacgataaacagtttcaaatttcaacaatgaaatgctcaacagcggataaaacatctatagcagatggtattgactttggtcatgaagaaataacaaaggcttacagatatgatgcacctactacaatgtatgtactacaattggtattatctagtgactattcatcaaatcaaatagtaaatgatacatacttatctaaattccaaccagtcatagatgatgcaattcaaacattaaaaataggatgatagccaaagattctgatttggttatttttcattaattttacaatattgcttgtctggattctattcaccattgaatcgtatccctacggatgagaactgttactgataatcttactaattattaaattacgaagactggatctggatgatagaagtaaaacaagaaattaattctaggacctaccatatagcaaatcattatttagcttctattaatgagcaaataaccgaaccaattgttctaaaaagttatagctcttattagtcagttccccaaggattatctattacaaatttccatgttccatcaccttgttgacgtagcacatctgcagatttggccaccatattaacggaattaccatcagctccagttccgctaaatgaccattccgtagttactagagcaagatcacttgcttgaagtactctcttaacctttagatccaatttacctttcaagtcaatgaaattacgtagacattagcgtatggattcttgatcctttgcaagctgtcctggctgggttgcaaaacatgccccagcctcatagagtgtcatgagggaatccatatttcctgtgtttataccttcaactactgaactcaatacttcttcaggtgtcattcttttagacataaagggatttttgtaatatcttactttaagtttatcataaaaaaggagatagtcaaacacctaaacttgttcaccattttcaattcctgtatagaatattgatgttatattagaaccctattaccacaagaaacttaatccccagcggcccgcgataatttgaccataatttgggattcagttttgataagactgaaatattaccgtgtttaacatcctttaataaaatgtaaaaatgtttgcgcacatcattgacccataacgatcaaaaacaatccaaattgtgatttccttgcagtgttagccatgatttcatctatcacaattagagagaacatgtgattaaactgatgacttatttcataaacaactcagataatggaaccccttaatcgattacctattgtattgtaaaacgtaaagatctaacacaaactgattgaggttagcttaggtggttgtatggatgcgcaacgacaagcaataaataattccaactttctgaatgaaagggacataggtaaagccgtatctgactagacatgtgattacagtaataaacacgatgcaaacaaaacaagattaatcagtttacatggagaaattatctttgcgtttccatgactgttaccagggccgctaaaaatgattagatatataactcttcatatttgaaaagtgaacgttctgcttatgaagtcttctgtaaactaaattcttgaaaataaatttagatccggttacctcgaaatgtttctgccctaaaagatcgaaagtacagggatcaaacctatgaaatttgaagagtttgcgcttttcgcctaagaaaattatgggggtcatgaaactgcaggacacaaacctaacctcaattttaataagcggttacctaacccacctataagttagaaagcaactagcaaatatcggtgtctgaaaaagtttatcgctgttaatataaccttatatgatataatccattttcacagttcaatgaataagaatatttatgacagaaaaatggagtatataaaggaggtaatattatggtggaagtagtagagctttccattaccccgactagagggtatcccggggtctacaaggtggacatcagcggttccggcttcgtgccaaatcagacggtgtattggcgattacgtggcgaggaccccgggtctgaagattttatcagtgctcctagtggcggaggcgtcgtcggcccagatgggacgttcttcttcactgatagcgctaccggcgcgaacttgaacgaggactgggggggccaagacgaggtctttgccgatgtatactatacttatgttggcgggtctcaccacaagtccaacacgatcaaacgcaacttctgaattccgattgctgcagcaatgactgagttaagcatgctgcagtgcccgaaatcagcgcgcttgggaaggagttaagctcagacaaataatgaggaatccatctattaagatgtgttacaacattggaatctttcagagaactaaatccgaaatcagacaaatgaaatacttcatgcgtaactgcatatgcaatttccccccatacaacccatgtctttggacattccttaacagttgtgtaaaaaatggcgtatatgtttgtgtaaatttatagtgtttgtttagacagcatatcgtaacatctttagctttctattttgaattatctttattatgagtgatattttcctcatgttgatttctgataatgaaataaacaagttgtatggtatgatgcaaattgggaatgaagaatctagttatcgtttcaagatcattctgtttaagaataaagaatatacagttcctgagataaggatggctatcaatcatcactatgtcgacataagaaaatggatacatcgattcaatgaacatggtgtcgaggactagtatcaagaatatacaagtacaggtcaatcaaggtaacgacagggattgagaaaggattgtagagataccacccaaaatccaagagaaggttatgctctacctttctcaaagtgatatttaagggtgctagcagggtacatatccaaggaacttaaccttggatatattgacaatttttaattggtgagatggagcaattaactctattacttttatcggatctgattttgtactggtgtaatagaatctcattgccacaaaggacaatccccacggatatattcaatccgagacaaaatattcagaaattaactaaaatcatactgctttctttttaactacctggagactacaaatctaatgcatttcatagtttcaaagtattgacattgaacatgagaaatcagaaaccataatgcaacattatgcaatgaaaattagggaacagtatacatttctaatatacttttgatcccttgtatacttattaggtatttgtgtgctctattcctcatggctaatcctaattttcaagaatatctttttgagtcaatgaaattagtcagaaggaagaagcaggattttttagatccgaattgcaggggagagaatagatgagtgataacaaaaaggcaatcagaaaattaaaactacatgtagggatgtccattgatggttgtattgcaggacccaataatgaaatggactggatagactttacttggaatgaaaaactgagagaatatgaagacaagttacacgaaccagttgataccattcttctgggaaggaaaatgactaatgaatttatttcctattggtctaatgtgatgaacaaacctgaagacctcgaatatacatttgctaaaaaaatgatggaaacaccaaaaattgtttttactaagacacttaataaatcagagtggccaaatactgaaattgcaacaggtgatctcaaagatgaaattacaaagttaaagaatcaagaaggtggtggtgatatcatagtctatggtggtgcctcatttgattcttctttgattaaagaaaacttgattgatgaatattatttgtttgtcaatcctgttgcaattgggaatggaaagaccatatttaaggacctaaaagagattcgtaaattaaaccttattgaatccataacgtttgactctggaacagttttgcttcactatgaggtaaagaaaaactaaaagtaaggtgtatcaataaatgaatggaaaagtcagttggttatttttttatattattccatttatcccactgtcacataaagatatccagatgggctatcttctagcgtattcattcttcaaaacttgatccactttctatcttgttttataccattatcttcatagtaactggtttggattatttatttgcaaaaaaatatgattattaattagataaaatcattattagactattcaagatatttcttccgatttactaaagtctccaaacactattggtccaggcgtaatgagtttcatagattcatcatacaattcggccgcccttttatcgtcttccaaagccttcataacctcctgaacatgatttgtatctctgtagaattgtatttctaaccatacatcctcgtcatcattggcagaaatggtttttgacaaatttacaaagcccatcatatcctctcttgcattcaacctatacccatattttgacacgccgtgtttcttgaaaaaaatatcagtttgtttgccaatctttattaatgcatcatgattcttctttggggcacggatgaaaaaaattttgagaacaccaccggaatctttttggtttgcaaagttgtccgaaccactcatatgaattgatagaatatggtattataaaaataacaaagggatcaatagtataccagcgttagataattattcggataagtcagtttaaaaatagtttttgatttaatttggccctgttaacttaacgataaatctttagcttaaagacgctctatttctgttatgttaagtaaaagaaataaaacatcttcagagcatatttactatggtctgtatttgtactttctaggcttatcgcttagaaatactgccaaggcattgtcctttttacatattatcaatagaagtcacgttgcaatttggaattggattcaaaggtataaacctcgaaaggtttcaacaagaagaacaaaaatatcagaatacctcattgatgagacattaataaaagtcggctcagaatactcctggttatgggcagcaatcgaaccagaaaataggcaaattctcgcactctttcttagctaataaatccaaggagaggaacatgcttatcgcagagagatttatttcaggtctgatcaagattcacggaaaacatgtcgtatcaacagacggtggaacctggtacccaatggcttgtagattcctaaaactaaaacaccattttcattcctcattagagataagcctgattgaaagaactatgcagtacatcaaggatcgaactgaaggatttgacgattactttccatgtagtaaagagaagtgtaaactagatcatgtcaaaaactggttgaatctatttgtaaaaatacacaacaaggaggtgccaaacgcctaagttaacagcgcctttaatttggtataatattttataatgagtctagatgaaggagaaccaaagtccaatcaaaataatgccattaaaccttttggaaagtttttggagccttcgatatcattccaagatattactgagatcaaataatagcttttcttgatacgaaaattaagaattctcaaatagacccagacctttgatgcctacatataatagagaaatataatagagaaatctagttgtcctaacttggtagtaaacaagtaaaccgactcgaactgaaaccagaccattcgattttgtatttcaaccggctaatcctaatgacttattctaaaggttaacttgttcagcaggaaatttcctagggtctagtaaattaaattcctctaaaaaggcttcggcttgttcttctgactccataaaggctttagcttcaccttttcgcatccggtctagtttcccgatcatttctttaaatttctcagcattcattactaatccatagtaatcttttactctttccagagttgtttcataatgtctcttgtctccagacgcagtagcatcagatattattgacacatcgtaacctaagttaaatccttcccttagtgaagtctctacacaaatagaagtatcaattccagtaaataccaacaaattaatgccctgactctgaagcataattcggaatactgtatctagaaaagcagaatcccttcgttttagaattacaggatctttctctttaggttttagttcatcgattgttaatccatcccaagtacctctaatacatatgggtactttcaatctctcctgtcttgatttgggtaagatgttatggacgtttgtaagaatatcaatgccactagcttcctttactgcttcggtgtaaaaaacaggaatacccatactcctgcagaattcaattaaatccttaatctttggaataatctctctatacagagaggtattcataccaattttatcatacgatcctccctttgacacgaaaccattctgcatatctacaactatcaatgcaggtgccacggtacggcctgaaggcaaattgactttaaacaatttttcattctcattactaatccgctaaagataaacatttaattacagacatgctggggtatggttgattcttgttcttgttcttgttggtcatatccctagtatacattgaatattcatatattgtcagcaccttctgtctagattataaccattgagaccggattatgttttgtgatagcaaaacacaagcgaatacagtgctccgcaggtatcacatatcacatcttaacattattcgtcgcgtctatgtggatggatcttgatatttaactcagactattaaggattcatccacacattttatctagaataagacaaataattttctagagggtgtttactttgataataaactgcttctattaacaattttaccgttgttgattaccatttcaatattttttgtgttactaatattttcaactggatttgataaaagcactattagatcggcctcttttcccttctcaatcgttcctgtataatttgatattcccaaggcttctgcaccatttttggttgctatctgaagaatatttgacgtagggattcctgcatttgcaagcaattccagttcatgatgaaggctttttcccggaacaaggtcaaagtttggaatatcagtgccgctcaaaagctttactccattatagtacattttttttgttagctgcaagactttgggccatatttgttgaccattagctggatcaacctttaccattgattcataaacactcaatgtaggatcgacatatacattattctttactagggcctctatcatttcatttatttctttactgttaacctctactagttctagccaaaggaaatgatcaaaaggaccatcaccatatttcataaaagtttccctattctgagatgataataagtacgggcttacaggtacaccatgagttaagtaatcaattttgtcatcagctgcctctgtccaactggttagaaatagatggccaattactttgagccctagagagtgagctttatctattgcctccttcactaaatcaggtgtcagacccacatacaatttgataaaatcaactcctgcttttgcctgattgtgaatctcttcatcaacttctgatactgaattaactttcttttctacaaaaggtattgaaatattgggtgaatttaataatcttccagccgtaaatatttgaggtcctaacgcgctttcagaggacacattatttttcaaacccgcagatagctctgtcggaccaccgggattcctgatggttgtaattccaaaagccaaaagcttctgcagagcctcatccgagtatgtttggttgaaagagtttttcataatcccagctacatgtgcatgcatatcaaataaacctgggataacgtatttaccggaaaggtcgattagaacagaattgggataatttttataaaaataatatttgtcaggactatctttatcgattacttctaaaatcttatttccacttgtgattattgtggagtttgatcttaatttagagttaccatctacaatattagtattgtataaaatcactaggtcatgtgagtagtttgtatcattttgcgtgaattttgctttatttgactgtagaggtggcggttctagtgaggatgcttttattaaattatctgcattggaggaactgattgtttctgctttcacaaaattaaaaacattaaaaatgctatagccaagggaaaaaattaatatgatggttattgagtttgttaatttcattttatcgagatttttcacaacttttaacaattataataaatcagcactccgattataatgattgatttctagttattatggatgtcttattttataattggtgttgattgttttttatcttttttatattaattgcttaaataaatggttatatgcaaatgatgaatttttagtgactctgaattcatgtattggggtttacaacctgttcatagtattctatctaataaagtaggaagaaaaattctcatatttcctggaatgttcgttcaaaatataggaatttagataatatactatataaaaagatttcaatgattggatattagtaatgtcctactagggataggaacagctttagtttactcgacctagcttgttgcaattaatgatatcaccaatctaagctggtgaacaatatcgttagatgtttgaaggttttagagagatatgtgattcgttcttgggtaattggaataagacaaatctctgatttatttattgtgtttgttgtaattcaggcagctgcacaaacagatagatttgacttctggtatcgttgatatacttttaatgaaagaaaaccaaaacacgatgcttttgccaattttcgctatctacaagatcaacatttgtattagaatcctactatcacaaggaacttaattcccacgggtcacctgctacgatgaccatttctaaataatctaattaatattgattagacatatatccacgaataaattgatttagccgttttgtctaccatctcaaacccctattgcacaaactgaattgtcgaatccattcagcaatagtgccttaattaaattagatttaactaatgaaagacttaacagagccatttgattataaaataagtatggaaaccgatcaagatttagaggaattaaaagaagaacatgaacaagaggaggaagaaataagagataaattagaagaggaagaataggaacaacggattagagttcttaccaaaaaatgaaaaaaacattccttggaaaacaatgacatcgcaaatatctcaaggtacattattagttaataatctttatatttttcattattctatatactcttagaatcctatttagaatattcactgataaataatttttacataattaactaactagttgaaattcaagatcaagttatactcaaatacatccggatcattcatttcaagttgtaattgatactggtatatgattaaaaatactgtgaccggttaatgctattgacagtgaggaaaaaaggctgttgttaggcagttattctggctgtttcatggggtttaaatttattccacataattccaaatatagcacctagaactaaatagaacataaccattgtaccaaaagtaacggctctaaatgcgttgactaaatccattggtgcagttatttcatcaggatttgctggaaatacggcataaataaaagcaactaagcccaagtaaattatgggaattacatacttaatgtaactgattttacgtaacttatatatgagaatactggcgcccaaagcgattaatcctgatgccagttgatagctagtatacaaactatcccttaatccaatagtctctggatcgccgacagcaggtgggtttgtaggatatttgatgaaaggaacgatatataatgataaacacattatggctgctaaaatgagtgcttttttcctatcatccgaagaaggcaaatactttctcgatattacataaacgattcctaaaatcgcaccatatgttaaccctaagaatgctcctgcagcaaaagttccttccttttgccacaccctgtaagtacttaattcatcaaaatcaactacttcaccagatgcgatgctgttatccacctcaattcctatcgcttgatctatgaatggctctgcaacaaaataattaacgcctgctaaaattactccagctataacacctgacaaaatagatacaaaaataaatgttaaagatttcatgttctataatctaattcacatgtgaggatataaaatgacaaatattaatggcatggaaatcccgctgcatgtcttatatcatgagtaaattcatgaagccatattgtgtcatatgcttcatttccttgtaccaaactaaataattggccttgatcatatccgactatgtaaacactaaaaattgcgataatggctaaaactgcgattgaaacctttggaattccatctttttctacaaccctttgatcatgatgtagactcacactgcatttaccattttcgagatatataaagtattgtatggtttatccaacatcttgtgtttaggactatatgggaagtcggagaaaataaagtaacaatggaatctacagatctgaattttttttaatggttcaatactatgtgttttattagataaaattttagatcaagattatgaagatttattgactcagtaatttggagtctaactattcagaatctgatcttgacattaattactgcatcaatcatgagaaacagataaaaaaagagataaaattaaatttgtaagatactaacttataatgtgcatcttgtggtcaataccctaaaagccatatctagcagatacgcacctagtagaattctttctttcaactctgctcatgtattcaagacactacaattattaaaaagggacgggcacgttagtagacttttactgattaatgagttgggtctaggagaaggttccataaagactttgataaagcatcttaaaatggaaaaattaattcttacaactcaaaagggaactatgatgactgaaaggggggaaaagatatttgaagagatgtcacaatatatttgctctgaaacacaagtgcccaaaagctcgatatctattgctgaatataatcatgccattcttttaagaaaaatgaaatttgctattaagcaaggcgttgagcaaagggatgcagcaattaaagtgggggcaaaaggagctacaacacttttgtataataatgggaaatttcttatcccgggttctaaatttaatgctctaaaagaagaaaaagctatggaaaagctgttaaaagataatctaaagcccatagaaaacgatatcatcgtgattggaagcgatgacaataactacataacagccgagcttgcatcaaaatcagctgcacttcagacgctcgaaaatcatgaagatcataagggattagaatttatcattagatagttcaaaacataataataaataataataaaacaggaataagcaagatataatattcacataagcaaattaaatgtcaattatgatcaataagtaatgaaataaattggaaacatagtgtcgggcctgttctttcttagtgtgtatacccctagaacatatcccgatcaatattaccaattcttattaatgtgaccttttttaaaacttatatgaataatctagtgaaaactactttcgaagaattagtaaaagatgtaattttacttgatgacgttatgttatcgataagaagtgatggtgcaatagcagaggtcaaactggaaaaaaatacaccttttcgaattaaggaacaatgggccactataggagatgaaaagggggcatggcatattcacgttaatattcaagaaacaaaggaagccaagttcatcatagaatcaagcgaagatggtagaagaaggtatagcattagattctttaattctggaaatagattaatcttgcgtgtgaatttcatgaaaatgtatactgcagaaaatgaggtaattaaggaaagcttaacaagatatgaaaatttattctcaaaatatgggaaaaaagaaacaatagtgttacaatcctgatgttactaaaggcgatcattacaaaatggtccaaagaataaactattactcatagtcgccatctagctagagataaggtcgatttttttataattagaaatcaaatattgatagctttaattaggtggtaacatattaatcctagaaaacgaatttgttgttttatcgatttctaaaacgaactataaaatcatatgttataaatctatcaaaaatcacatatgatgaacttttttgattctttctaagtcaaagtttgtgaatattaaaaaaatccaaaattaatatgaataatggtagattactcccagaaattgatatataggaaaaagagaaaattccaaaaagttatggcaaaatcaataaattctacaacataaaacaacaaggtatatcttgaacctttattttttgatatagttgtgaaaagatttttctattcctttgacacccattcaatagaaatggaggcaattaaatgaaggcagcagtttttcgcgagcatgataaagaccccgagaaggttgtaaaaatagaggatattgaagtcccaaaattaaaacctgatgaagtcttgataaaagttgaagcaacttcatacaattataatgatttgtgggctatttgggggagaccaattaaagttccaatgccccatatttcggggacagatatttcgggtacagtggtggaattaggcgaacaagtcacctcgcttgcaaagggtgatagggtggtatctcatggcaacctaagttgcaggatttgtagcatgtgtacatcaggtagagaatatgattgtgaaaaaagactagtttggggttttcaaacaggtccactatggggaggatattgtcaatatgctcatctaccagaagtcaatatagcaaaaataaacgacaacatatcattcgaggacgcagcggcgatctcgatggtaggaatgacttcatggcacatgctagttgatagagccagaattaaaccggggcagacagttttgataatgggtggaacaagtggcgttggaatggtgggcattcaaattgcaaaattatacgattgcactgtcattgcaagtgcaggcaaccaacagaaaatggacaaatgcttagaacttggcgctgattttgttgtgaaccacagacaagaagactggtacaagagagtaagagacgtcactcaaaaaaagggagtcgatattgtgtttgaacacataggtaaaaccgtgtttccacaagaggtatctcttttaaaaatgggagggacattggtatctacaggggctaccactggatacgattctacaatagatctgaggtatcttttctttagaggaataaacatagtgggtgcaacgcaaggtactaaagcagagctcgaggaggttttgttttggacttcaaagaaaaaaattaaaccattgataaacgctgtgctgccctttaatgaaatggtaaaaggacacgtgatgatggctaagggagatcaaataggtaaaactatcacgacgccacaaaaactttaaatttaaatgaagtatcaattcattagaaaaaattaaagtaatcaaaaatatggtgagtgaggagttagtaacacaaacgtatgaccactccaccagttgtattatttattattgatcctctgattcctcaagtatgtccataatactgaccgtgaattccaaatggaatatgatgcggtactaatgctcttgcaatttctttaaatgattttgaatctagaattagtaagaaggattgaccactatttggatcaagtacgaccgacaaaataaccccgtcatcttcccttttggcaccaagtcgagggacaaaaactggttctccgggttgacaattctgttcactccaactaacaaagtctccagtttgaacattaatcttgaccaatcggtttgtaaaactggtaactgaggacatccctacagcgtataaaaagtcataattcttcatgttaagatgattatttatccttggtaactctaatccctcatgcattatcttgtatcccacagagccgttgtctagacttatcgtaaaacgacgatattgactaacaggaatatccataggctcgtttcctcttaatatatcaagatagagagaatttatgatactattatcctcatacgttatcatatcaatgactatattattatctacttcaaatgcgtttatatgatgaaatgcaaagaaaggttcacaggagtagatcccaactacctttccatctagtctattaatcaatgtaatttttgttccatgtcctggtctccatttaaaattttcaatgaatggtctgcctgatagaagcaaatcaagggaattaactacaagtggaaactctacaagaattatataatgttcagttagaccaaaactatgcatgtatgaaggtgttttgacttcaatagatgttatcaaattgcgagtctttccagctgtgatgcgatatacattatatttgctattacgagaaaaatgtgtaagatagttgaatgattcgttggtattttgatcgtagtggggatgagcagtagtaagactccctaatagtttgtcatcatatctcaataccccaatcgtatcaagggtttcaggatcgtactctattgggattggagtttctgtcatagctataaatttattatcaacttttgatatgtttacgtttgtattatctgtagtatcaaatgagaacactgaagagaccctgctaaatatcgaacggcaaggatcggttgcaaattcacgaaatgatatttttccattttcttttgtcttgataaaagcattactcttaatgaatttgttagtatatgatacttttcccgcattgaaggaaaatttgtgaagcatagccaatccatcaaaccaatgctttaaagattgttcatccaagtcaaatttggcaggtccatttctaataagagatcctgacagccattcagggattttgccctgcacgggtagatcatcgagcataatttcttcctctaaatcggtaaatcctaattgtgacatgttctttacagcattcatttctaatcgcgatcctcatttgttatcaatatatgtgacttcgcttccattgggtttagaaactgtaagaaattctccccatgatttattgaagactggtatttgttataatttttttttactttttttccatacctaactattggaatttgtactagattagatgttttcaacggcatcgtttaatatcaatgaatgtattgatagattcgaaatgcagcaactagctgatcttttgttcattcttgcaagtgtggacagactaaccctgctttctgaaatagatataaataaacagagactttcgcaaattacttccaaaatttctgcaaccccacaagagacttctaagcatctcatgagattgcgtaatgcagaaatagtagaaaaggacccagaggtttttttaaccttacagcgtttggtaaaaccataataagattactaccggggctaaaatttgcaagtaacaatcgagaatattttttgtccaatgatttatcacttcttccactagagttcaatgaacgacttggcgagttatatgattcagaatttacagacagagtaggacctcttttatcgtatatacaacaaacagtaaccgaagcggaagaatacatttggttaatggcagaccaccccatcggaggtgatgaatacgtgggtggcaaaaaactagatactagtaacgtaaaatggagggtaatcattccaagaggaaccgatttcgatgaaataattcttcgttaccggtcactaccgacaaaatacaaaggaagaattgaatatgtactgatcgcagattcaaaagatattaaggcgggtattgtgttaaatgaaaaaagagctggagtaacttttccagatatgtcaggaaaattggactttaatatcgggtttaggagtaacgatccgttatttcataaatggtgcttggatctttttaattcttactggaacaaggcaacaagaaaaatagttgtatagttaagatggattaaatcgatcagattcctactcacctcatacttatttagttggttcattcgcataaaacagaaataaaccatcacacattagatcggtagctgataagatgcctgatcttggctgctagagacaagaattgaaaagatattgacattcaatggactattgagatacttttttactaaataactaaattgagtgatcatattatttttatttgaagttaactatcaagtgcagataataatggttatgctcaacaatgttagactagatcacgtaacatcctttggagacgctgtatttgctttttcaattactttcatagcaatttccgttcaaataccggctttgccagataaactctctgaacttgaagttgtaaacaggatgttttagcttatccctcaatttgaaatgtatttcacaagttttgttgttataggaattttttggataaaatgtcatttgattttcaataagataaaaggttcgcaaagtgtgatattgtggcttaaccttatcctattgttctttgttactttgatatcatttggaacttcactgagatttgaaaatcaatatatatcaacttttgtccttatcgcactcatcttgactgctactagtagtttgctttcactaatatagattcatgcaatcagatacaatttattgatagacgataatatgacaaaccgtcagaaaaaatcatacataattcaaggaattatccccactctaatatttgctagttccattggaattgcttttataaatttgcagcttgcacattatatgtggattctgattattccatcacagatattttttaaaagaaagactcacttaagttaattccatccggtttgttaatactactcgaatttggaatggatcttgttaggtagatatatttttactaatagaacatgaatataaaaataaaatagggatttactagtaatcaactacagtagttttgtttaacaaattagccattaatgcaggagacccgattatggatccgtctattatatcagaattatcatatcctgctatttttaagcatacttcacaaatcacaacatttcctccattatcaataaaatcagaaacattttttgtcaaagtttctaatcccagataatggtgaggattctttacacctatctgtacaccctctatactaagcatcaaagtcacattataacccattcttaacatggtttgagaatccaatatggcaatagtagatctccaaggttcatcactacttagatggtaaacaagcttggttttattaacttcctgcgcgaatgtagaaggcacagagagattagaaaaagaatgtatatcgttaaaaaaaatcatactagcggttgtataaaaagagattagcaatccaaagataagaagaatggaaatagacggattaattttaaatttaattgcacctagactagtctcaatcatataaataatatcatttcaggtgactattaatctttatagttttagttcgataaatgcgggtcctaaaatggactacttttcttaatgatatcatattttctttattttagttttaatactctctggagttcatgaaaataattcaaatagtgactgattgtaaattttgtttgaatcaggtttctagtcctgttttcgtttctatttttaatgtcggatctaaatagtttactaaatacaaaataaataataaagtaagcagataatgatatcaattacaagccaattcattgcctgattacctccctccctcatttgatactcgatttttatgaaaatcacaagaaattagatgtttcgtgcatacatctactgctgagcagctgcgttacttcctgtattttcttgactttggacgttgatgttgttaccagaacctattgtatctgcacctgatactacttggctgttttggctggaggattgagattggctgatgctttgttctgcagagtttccatcctgtccaccttgtgctaatgcgttgtttccactgttcttttggtgttggaaactaaggttgttgcatgatagaaaggttgttccacctgatacacatccagcattttggtttgacgattgtgattggtctatggactgttttgctttatttttcttgttgtgtgtggctaaagcatcatctacattgagtattggactgacaaatagggttaatgctaccactattgcaattgatgcgacaaagattttgctgtttttgtttttgattttgttttggttgtgaatatttgttttattcatacctttgatactatgaaaaaaatatattgggattgctaactagatgcaatactctaatattctagcagttttagaattaagaaattgtagttcaacaacaataggagattgcaagattgaatgagaagtaatttcttactttgtcctagtacctatatataatcttctaaatcggacatgcaaggcatattattggaaacaattctcatccgtggggattcgtgtagatatcggtattttaaataggattctagtatcaataatagaatgagacacaaacttttatgtataaagaggaaccatattgcaaaataatagatcttggttgtgaaagtcccaatatacaaggtctgcaatcacagtcaaaaattatattaatggatggtttgtcatactctgactgtgagatattctggacctttcttaggactgtttgtcatttcataacaatcatatatacttccatcatcttcgtcaaccacacaaacatgaaaatcctcatttgtattgattaaaccagacggcataactattctagttgtatactgtccgtcaggactatcaggatcatcatcatacattgcatcaattaaatcgatattgtctcgcgagtattccggatattcttctatgtagaagcttacatcattgggtccatttcttgaactgtctataaacgtcacctctactataaagctgcccctttgagcgtaagctgtaggaactaatgtaagaaccagagaaattgatattgccaatataatctccttctttatcatgttgacataataataccatcattaatatttaagaattgcgaatcattcccaaaagtatgttagaacatacatcaaacgtgaacataatttgactaatgaaagagtacaagaatcagattattttattatataccaaacctttcctattctattaaattaagatgtcatatgtaaaacaataaaataatcaacgatttgttaaatgtattacagaagtacaggttttgcattttggagaacatcgataatacagggataaaatggttatatagtagtcaccatattggttcgggtatacaatcatgataatgtgtcttgacagcaaaaatgcgtacgagtcgtgcccaattatggatagaagtatgggcgttagaaaaacaacagataatagagatatgagtaacaatgcactcatctcatctgattatttgaaattagtatgtgactttaagtcgattttaaaatatgactgcaacagtgaggagtaatagagatgaatccaaatgttgcggttagtttcattatagttttgacattagccatgataatgtcatctaatatctttgctagttcagatggaggtagttcagatggaggtagttcagatggagatgatggctcatcagaaaatgaacagccagaagtagagtcagagcctggagtatcagaagaagaaactgagccagaaactgaacccgaacttgtaaattgtcccaacggtagtcaggcagctacaaatgaagaatgtggtacagagacaggtacaagtataacaccatcaccaggaccatcagcagaattaccaaatgttctgtggggtgattatttctatactaatccttgccaatctaatcccaccgatcccgcttgtaaatcatcgacaactactggtacaacaacaggagcaccatctggttccattcctggtgattcaggatctgtcaagaatgatatttgtacgaaatctcccgaagctccattttgtaaatcacaaacaattattggtacaattgatgacaccccagctgcaacattacttttaccatattttgaagtagatctagacaaagatgaaacaacaacacttttcccaggtaataatcctgtttgccaatctaatcccactgatcctgcttgtaaatcatcaacaactcaaggtacaacaactacaccaacacaacaatccaccacttcaggttggcaatatctttgcttatctaatcccaccgatcccgcttgtaaagaatcaacaacgcctggtacaactacaactactggtacaacaacaggagcaccatctggttccattcctggtgattcaggatctgtcaagaatgatatttgtacaaatctcccgaagctccattttgtaaatcacaaacaacgacaagctcaactacatttgaggaaactcaaaaggaagctgattcgcgtttcagtgttggttttgatgctatttgcctccaatctaatgatcccactgatcctgcttgtagatcctcgacaacgcctggtacaactacaacaccagctacaggtacaacagcaaaacaagtagaagtatctaaaaatacagatggaacatgtccagcaggatctcatatagtagggtttggtggaaagacagggtcaaatgctcctagtggttcaaagtgcatttctgataactcatcagcgaaaacaactacgccggccaaaactacaacaccagctacaactacaacgccccctgattccggtccgatctgttttagtacatttcctcccagtcccgaatgtaataaaacatcaactacgccgaccgaagtagaagtatctaaaaatacagatggaacatgtccagcaggatctcatatagtagggtttggtggaaagacagggtcaaatgctcctagtggttcaaagtgcatttctgataactcatcagcgaaaacaactacgccggccaaaactacaacaccagctacaactacaacaccagctacaactacaacaccagctacaactacaacaccagctacaactacaacaccagctacaactacaacaccagctacaactacaacaccagctacaactacaacaccagctacaactacaaagacggttctagttactaaaacaaatattaacaatgatcaagtcactgtgagaaatgatggaggattgacagtacgaacgcttgacggagcagtaacacccactgcagattgtgccccacaatccgcaactactgtcttgggtccctccccaatggaaaatgggaaagcacgaatactcgcagcatttgatccatgtattcttactagtgggaaagtcttactcaatttaccagacgaaaaaggaattcaacttgtaggagctaaaatacaagatggacaaacaacacaatccgcaatagtcccaatacagagaatagcttctactgctccaggtcaagcacaatattttatagacctgaccgaacaatctacaggtttagaccttgtaagtggaaatcctgtgaatctcggtagcaatgtcaatgcattacttctaatgaatctaggcggagagaatgttcaacttagtgcagacaacaaagtaaatatggacgctgctctcaaacagggtgctataacagcaacagcaacacaaccgacactagcgtcacaatcacctgtatctgtagatggaagttagatagctagtcttgctgtaggtagattcaattatttcagcaaagttagcaataaacatgataatgtaactaatacctatatttctcaaatcaaatctattattttagaagagatctctaagagatattcacttcttatttgcactactatattaccaaataaaagatcattgagtttgggcgcgtggggattaagttccctggagtagtatggttctaatacaaatacggactctatcaataattggtataagttgatgggcactgaatctattagacacaagaactgtgagcaaacatgcatcataaacatccacgataaaatccaagaaagagatgttgaagtaaaataatcttgtcattgctattctttcaaaatctgtctaccttagagtggatcattataagaaatgacaaaacaagtaaactgtaactaatatcttaatgaccaatttcaattcaaaggtattaataacttgattattgttgtgagatgattaaatctttattatataaaaattattccatactcataagccaatttgttcactttgtcttgctcttcacggcttgatagagttttttaaattgtggataattgtctaaatctctttcaactagtgaagcggatttcagaaatgtgtcatcataatagctgagtatcataggtttaatgaattcaaccaattttttgtcactcatgattttttcattaatcataaacgaaagccattctaagctattgaacatgcgagaaaaccatggacttctgacttcatcatattgaggtcctacaggtatttttgccagttccctgtccacatctcgtagctctttcatgacatcacctaatgatgtgatttgatcaattctcttcgagcgctggaatgtgacaatagtaaaaaataatgctattgcatatatcgcggcgacaataatttgaatataatctgaaataaattccatgaatggacttataggtatagtatgattttagagttgactttatcatataaccgaatatccaatctgggccaattgtcgcagataattgcctctggacggctccattctactactactactactaccacgaccacctccataaccggatccggaaattcgaattctattatcgctacgatgaaacaaccaataataaataatattcattagtaacagtctgggcgcgtggggattaagttccagtggtaatatggttctattacaaaacaggtttaaagttgagtgctaataaggtaaaagcctgtctataaaagacttgtctgcttccgtatatttcttaaattcattgcataaatcttttagtattttctttttttcataaagagtcattttcgaatcgccatattgatactgcgcaactacttctactgcatttctttgttccagtcgagtcatgaccttatccataattattttgtaaagtctacccactttagcatcagaatatccttgttcgagtttacgatcgataaaggccttaaaatcgttcctatgaaataatagtgtttcaggaaaagtatcatatattccggacatgtcacacatatactttaggattttccactccagctcaatcaaatcgtctgttgtaaaaaattttctgtatatttcttcacaggtatcatcattcatgataagtcagtctaatgatccggttatttaaactagattcggatagctgttatatgaaaccggaaaattataagatgtaaagtgtcgaaatgaaccagccatatccttagtaagacgaaaattcatcaacatcgaatgttttaggtataactaatgtgataaaatgggaacttcacactttgatttatgagttcatcaattacgaaggattcaaagaaactccttctttttaattatctcttgaggtttgtactattatactcaaatacatatattgcaaaataaacataatttctgtgcagctagatatttggtatggtgttgaatacatccgtggggacacggttcaaggttgaatagaatctcagcatataatgagataaaacaagataaaatttggaatagattttgaaggaaaaagtgcgttatgagtttttcggatcggtatatttacacattagtttatggaatggaataatacataaaagaaactaataattcttctatctatttatttagatctattgttttcaatttctctttacttcatagtggagcaaaactgttccagagtcaaacgcaattgattcaataagtgatagtttacgaatctcttttaggtccttaaatatgggctttccattcccaattgcaacaggattgacaaacacataatattcatcaatcaagttttctttaatcaaggaagaatcaaatgaagcaccaccataaactatgatatcaccaccaccttcttggctctttaactttgtaatttcttcatttagatcacctgttgctatttcagtatttggccactctgatttgggtagtgatttagtaaaaacaatctttggtgtttctatcatttttttagcgaatgcataccaggagtcatcgggttttttcacaaaattagaccaggttgcgataaattcatcagtcattttccttcccaggagaatgatatcaactggttcgtgcaacctgtcttcatattctcggaatttttcatcccaagtaaagtctatccagtccatttcattattgggtcctgcaatacaaccatcaatggacatccctacatgtagttttaattttctcatagcctttttattatcactcatctatgttcccaccagaattcttaatttgaagatccctttttttataaattcggttgactcaaaagtatattcttgtaaataaggattagtcatgagcaatagagtattagcggtcctaataagtatagacgagatcaaaagtatattaaaagtcctttttggtcaattattttcttcacgtattgtagttctctaatccaatttcttagtctccataccgacaagttttgaaataacgtaatgattcagatcaaatattcgctagatgatcaaaagagtcgaattctaaccaatttctgaatatctatatttgcttgaatataatcctgggaacaaggttcaaggtgaatagaatatagaattaattcaacactagcataagaattaagtttctattcccgtcgagtcataatatcattactagataacagaacaataagtttgggcacgtgggattaagttccctgtgataatagggttctaatacaaatgaaagacttcagttattattcactacggtgataagaaggtattcgtctttatgtaatgtctgtggatcaactattagaccaaagtcgcttaaaattcagaattacactttaaataactttctgtgtattcaatgaatggaataggaactatgtctaatcgttttataatattcattatgctatttgtggttatatttagtgttagttttttggatacatcattacaaatcacggcctttggatacgataaggaaaagatgattggcaaggattatgattacaataaggatatacagattaaaaacaatcagttgttatcctcaaactacagaggatatgggtataccttagtatcttcaccattaatagaagatagccagaagataccgaaatcaaataatttgtccacatactcagacaaccaaaatataacaataagagaataccctgtccctcaaggctcaagaccgcatgacgtagctccggctacatctatgctttatgttaccgataatgtctcaaggaatttattaaaagatattgtttggtataccgcacaggcttctggtgaacttggaaagttaaatacaacaactggaaagacttcacatattttcctaggagaaggttcggctcctcatggtgttatagcaggtcctgacggcgcaccatggattactgatggtggattaaatgcaattgtacgagtagatccttttacagaagatgttactacctattcattgccacaaactgttggatatacaaatcttaatactgctacatttgataataatggaactttgtggtttacaggacagagtggaatatatggaagattgtttccatcaacaggagcgatggaaatatttgatgcacctaatggcgcaggaccttatggtatcaccactacaccaaatggatcaatatactatgcatccctagctggtagttatgtagggttagtagatacaaaaaccggaaaagtaactgttttagaacctcccaccgcagatcaagggtcaagaagagtttggtccgactctgatggaaatatttgggtatcagaatggaatgcaggtaagctgggaatgtacgatcgtcaaatggacctatggaaggaatggaaattacctggagataaccctaagccatacgcagtgtatgtggataccgatgataaggtgtggataagtgattttggttccaattcgatgtatagatttgacccattagacgaatccttcgataaatttgatattcctagtccaggagctaacgtaagacagattcttggaatagaaggtgaaatttggggtgcagagtcgggtagtgaccgtctcttattgataaaaacaattaactcacgtacaacagatgggtagatgaaatcctaatcatattttgcgtgtttatcttgacaaatcaaagggcaggcatctagttgtaaatagaacatacatccgcatacagctatagtccatctcatttcaaatttttaagtaagaatagtaacaggtctcatccgtggggacacgattcaagattgaatagaatcccgatacataaattactaaaatgtgaagaacaaacagatctagagtgttctaatataagctgcatgtgtcattttatttctggtaatcggtaaaggaataatgcttcttcaagttataatatcatcttcaatggggagcctattacaattcttatttttttaacttaaaaattttatcatatttctgaaatatcttataaccagattttacaaatttagctgatttataaatttttacagatggcttgataaattttaaaggaaacaagactggtataagaatagtcaagagaatatctatccaatatttttttaaaaaatatctcaaatctttacctacatatagatatttaataaagagatctattgatagcaataaaaataggagccaagggataaactcaaagtaaactttgtattcctttggtataggtataatagagtcactcattccaaacaagtcataatcataagacaaaaaaccaatgactaataaaattaacaatgcaaatatcgctagatcattgacaataagtagtttttgaacctcctgcattgttatatttcgaatacaatttacgcatcatataatataattagatagttgtaatatagattttagaatttttgaaaatagtgtattaatcaaagtccgacatactaacagtgatggtattggtataaggaaattttgttaaagtcaagagccgtttgtcgctgtccttgacacggataggagatcttgtagcaaaaaccggatactacaaatcattgatgaattctaatacgatattcgttcttttttaagtatattttctgtctttaataaccgtaagtaaattagtttatataaaaaactataatacatgggattattgagaatgaggccaatatctttttattgtttcacaattatgataatttatgaaatcctgtctgagagaaggctgaagagaagcagagttgtaaataagaataattttttaattagtctctcgatgacgaaacgtttcagaaagataacaattttggttccagcatttatcgataatggttttgtctgctctaaattgttttccgctctaaatatataagaatattatagatgataatttcgaaattatcttttagaagttaatatcctaattgtcttcattaattattatatctcatattttacgttaataaatcacgtttaaaatgttaaagtcgaaaaacacaaacaaaactacactagtattagtagtgtctgtattagcaaccataatgacattcggtccttcagtatcgaattttcaaagcgcatttgcaaccaatggtgtagatagtgaacaatgtaaggatgatgaagattactatgaagataatgaaaaagcatgtgataaggatctaagacttcactatggtgaagattatgatggtgattttggatctaaaacaatcgatgatgatggtgatgatgaccatgatgatggtgatggaaactcagcatctcaagctataggacaatctcaatcctctgaacaaaacagccaagtagtatcaggcgatgatacaataggctctggaaacaacatcaacttacaaaaccaagaaaactctggtagcaacgctttagctcaggatggtggagatgatggtgatggcaatagtgcaagacagggaattggtcaatcacaatcctctgaacaaaacagccaagtagtatcaggcgatgatacaataggctctggaaacaacatcaacttacaaaaccaagaaaactctggtagcaacgcagcagcacaacaataaccttttctttttttggccaattctattaccacaatctatcactgactgctagatgatgaaaaatgaaagaaacgataactaaaagaagtcgtcttgaattatactactatatactaagatcctgtatcatgaacgaaaatcatacaacaagatctttgaatagacaacttaaggtaccatattctttattaaatgagtgcttgatttacttagaaacattaggctttttagatattaactataaagaaaaaacaatcaagactactttagggggccaagactatgtacggaaatttggctatttaatgcaacaggtaggtgatataacccgcctaacaacataaaaatgtgtttttaacatttcaaaaagttttgttaccggtttcccttttatagcctaagaccaaagttcttcataaaactcaatttagtgagattgagtcattgtgaaatcaacctaatttagatctcgtcagtagaaacacatacttgtgaagtgaccaatgaagccggtcccttagactgaatgataagataaggttaagcaggtcttctttttcccacagttcagtttccaaatatgggctcaatctcttggttttctttttatctattttcaagaaggacggtgtgacccattcttttattggaatgtatatttctttataattagaatcagaaccttgcaatccgctagagtttttagtattatgtaaccatctatagaaatattttattctaccaagatagtcattccatgtttttatccaccttttatcaggatccatttgagaactcttaatttttgtatcaagaaaagctattatttgttccctcttactgatagaattaaatgatatggaaggttccaaacattttccaaaagctataatggttttaagattattattttgatatttatcagatgtaccagaggatttcataaattcataaaattccttgaccaatatttgattagatttgtttggtatgttctgaatcaatcaaaaaggaaatcttagaaaaggaagaagataagacagaataactctacaaatcagtgaagtcatttagcgtaattataaaataaaaagtgaattaattattgttattgttggcttttgattatctctgtattcctatgagtttgtattattctgctcatcgttaatactctcgtcctcaccgctttcttcagattgtgtactaaagtcattatcctgttcattatcggcaacattgtccccttcaagagtttcagaagttgacaattgttctgtaaactcctgttgaggaggaacattttcgttaataccgtttggattctgttgtgttagcggttgagtttgctcaatcataccgggtggtattcgttcgctaaatggaggctttggtggtgtagtggggtttggatcctgttcaaacatttgaatatagcgttccccgcaattctgatgtacgcctccagggcctatatcgcaatcagtgcagtaggtcactaaggtaccagcaggattactaggactgcgattaataatatgttcctgacaacaggttactttcacagttcctgtttgcttacaatcgatctgaccagaaggtacaccataggcaaaaaatgaatatgtagtatagtaacttataataaccgcaacaaacagcgataatacagttgtatattttatggaattagttagcaatgaattatctcatttgtgaatgctattaaggatttttgtttttagtcaataacacaatggataaaaatatactatcgaatattttgatctttattaataaaagtgtgaagtttattgattcatacaattaggtcacatacgtggggatatcgttcaatgttaaacagaaattagaatcaaattgacacatgcgacaggaaaagattcaagtctgaaaatcataatatcattaccatataagatatcagtgagttcgggcgcggggggattagtgctgatatcggtattttaattaggattctagtaagaaattagggaatagcctttcttaaaaactttatgaaaatgccattcatcaaaatttggattacgtctcatcggaagtacattaatggatcgggccccagttggcttcatgccgatatcagtcctttacggtaaattatatagcattcaacaaaataattttataaactgaaaaaaatgataatatttgtaaagttatatcaaatatgatattatttactgttattagcactgggggtgggactcgaagcccgggcataaaaacagggaatctaactttttgactctattaacttgagtttaatcgaaaattgatttgaattaacctcattcaaatgaaccaattatgtaagaatttcatatattctaagtacgatttatgaccttttgttccaaaatgaattaacttactgaaaagcaatattaaaaaattttgtaagagccctgatttcttaattaaaaccttaaaagtggaaagggctagatttatttgaatattaggtagtgattggtttatgattaaattcaaaaaacaaattacaaagttggcttatttttcaaaaatttctcataggtaaaaaaaatcatcagttgtctttacacttctgatgaactacctccttatcagcctttgttttggatttattcttgaaacaaatccaaaatccaaaagtttgaaagaaaattataataaattaatttatcaacaaagtgaatcgaatatgttaattggagataacatataaaaaatgccacaaagatgtaaaggtacatgtcaacaactcttagagtgcaacgacgatttggacaaagaagttagaaaatatattcgatatggttacttaaaaggatataaacgatgttctatttgtgaagttttcataaaatcattaaatcctagtaacgtgaaatgtttttgctgtggtgtacagctaagattgagaccttataaatcaacactaaaggaaaatttcagaaactcattgaataacaataaccaatgtaggaaaaagaaatctataacgataactacatgaaaaaattttgtactcaaaattctagcctaatatattcatagaaaattgagtatcaaaccggggttataatccgtgaaggggatggcaggcttactcacatatgattgaaagatgtttgtgaaagagttagacgacaagacatagattgttttaatcgaactattttaggattgaaatattaaacttactataatctatccttgccaatcaattttccttccttttttgccttttcacatcaaagctttgacatataaagttatatactagtgttttgtgggttatctacatgacgcaaaacacgcaaaaggcaattaatgtcgaacaccaacaatatcccataatctattgcaatgtttgcaattcactgctaatcaaaagagcctcttgtatttgctgcggacttgactattgtatttttcatcatttacaacatctcataaacattggagcaatgccacgagatacagacattgcggacttcagaagacagatggaaagtatgaaataacatattttttttaaaataaatgatgttccttgtgttctctgataaattcatccacaagcttttttggggaataactaatgagcatcgaagaacggggatacctccattaattaaggaaaaatatccctctatagtatactaatagattaaaagttaaatttagatacaaagcattattttcggtatgatttaaagtaacagtttgggcccgtggggattaagtttcctgaggtagtagggttctatcacatcatcaatcattcttatgataacatcttggcagatctcgtattagtttaagttagacagcatcagagaatattacgagaagggtcggccttatagctgaccatattaggggaacgtgaagatccattggcccatatatgggctagtctttattaatatatttacttaaattatgttcatggtaaatgcaaaggatattgtattggagtttgtagatgctctggagcgaaaagactttaaaactgttagaagtcacgtaagcgataacatatcggtcctggcacctggacctgttgagctaacaagatttaaccaggctgacccatatgtgacatatctggaacatgctaacctaccaacatttgagatcaagaaagagtttgaagataacaatgatgtctgcattctttatgaaatgaattatcgtgagccgctcgtgatgatctttgtatgtgcatggtttcaggtgaatgacgataggaaaataagttcaataagattcgttgcagatataagatctttgttgaaagagaaaaaatagagggagataacagttgcaacagctcaaggcttggaaccaatgggctttgaatccttgaagtatatgagacctgttaataaataatattagtataaaaggatagattttgcttctcgagcaagagaattattctatctatcatcctagtattcgttctccatgatgtcaattgtttaacaacttaatacaatctaactagagttctacctatagtatcccctctaaaaagaccagcaaaggcctgcggtgcattttccaatccttcaaaaatactttctttaagttttatcttatcttccctaatccatttagacatgttggtattaaattcattcaaaatatcataatgatcactccagataaaaccttgaagtttgagtctatgcgaaacagccaatgaaagattggaaggaccttcagagatggatttagtgactctttggttttggtcttgattatcggaggatgcatcgtcattataattgtattgagaggtagttccacacaaagcaatccttccaaaagtattcatgttgttaatagcagcttcaaggtgtttacctccaacattatcaaagtatatgtcgattccatttggacaagctctttttagctcctcagtcatgttgtccaaaccgatctttctatagttaaaagcgtagtctactccgagttcattaactaaccattttactttttcatcactaccgcagctacctacaacatgacatccttttatcttggccaactgacatgcaacggagcccacacctcctgcagctgatgatacaaatacagtatcttgcctttctcttagattgcatattttaaaaagacccacgtatgctgtcatgccagtgattccaagtaaaccaagaaaagatcttaatggtgctaaggttgaatcgacttttgatatggattttttttcaatttgcgtatctttgtcgatccaatattctctccaaccaaaattggctttgacataatcacctactttaaagttagaacttttagactcgattatttctcctatacatccaccatcaagtggtttatgtagttcaaaaggaggagcaaacctagtacctttgaccatatagatacgcaaaaatgggtctatggacatccaaatgtttcgaaccaaaaaatcaccctcctcttttaggtctggaatttccaccgtcactagctcaaaatcttctacttttacagatcctgaaggacgcttctttaaatgaacttcatgacctaatctttcgtttttcaaattacagacacctagacgttgacaattcaaatgaccttttttgtttgaaaaaattgtgtaaataatcaaggaatcgaatattttgagtataatctaataaatagcaacatatgagaataaatgtctctagtctacctagatgatatctaactgactgtagtccttgcgaacataaaaggccaaatttggaatatttcatgaataatctgttacatgtatatcgactggaataatatgtggatttccttttctcaatttactctcttgtataaccaaaaattatttgatccattgttacttctccatcttgtggaaaagtaattgtcaaatccacgtctatgtctcttcgtgtattggctagtaattcagtaattgcgacacagtggttgatgcctgctattctaattaccatttcaataactgcatagttggagctacagtattattcggagcacaatataacaggaaaatacaaaaatctgctgctggatttacatttaaatctgatctactactttacggactttttattgtagggtcgttggttattgaatgttatcacttatctactaatttacatccaattaaagctctgtaatcggaataaccattagacattttttgtaatgctgacatatgcaaagaaaaagagagaaaaagaattctcagacagcttgactcaacctatgtgaaaagagggagtgctatcattgggctatgtttttatttaatccctttcaaaacatgctgtgaagatcattgatgcaagtgaaccagaatttggcggtccaatgacagaagaagaagttagaaatttcttggtcaccagtaacaaaaatgttcacatttcaactttagacaaaaagggagaacccaacatacatcctacatggtattattttgataacaataataataaaatttacatagagagtggaagagaatctaagaaaactcaaaacctaagaaagaataacatcatatatttttgtatagacgatgacagaataccttacaaaggagttcgtggcaagggaacagtaagaatatctgatgatgttgattataacctacctataatggaaaagattgtagttaaatatcttggaggcattgagcatcccatgtcacagactatcataagtaacatcaggacaggggatgccattttattagagataacaccaaagttttatgcaacgtgggatcacggcaaagtaaaaaagtagaaggaaaattgtacaataatgatgtgttttcagaaggcaaataaataggatttgcaactcccaaagatagcccatacatctatagtagactaactagatgagaatcaatagaatattagaaacgataggatagaaaagtatagaaaatatgtgaatcaacgatctgagaatgtctatactctgcttcattagacgattcaattttatacaatatagtccagatttattttcgaaaattcagtttctccaaggctgaatataatgcttttatcaacattttcaaccttatgttaccattacttgtaactattttttatggtgaacttaattcaacattacgaatctttggtgaaacataagatcatttgtttgaacatgtgtttttgtttacatgtacactcccaatgctattcaattctttgattaaactctttgaatggagtttatttaatcggtatgaacaatctatctattatagcattttcaagaaataatgatttattaatagattcagctaaattttttatttgataatcattactttttgaatcacagaattagtgtatctatcttagagaaattaaacaattggatattttaatgaaattggtaattgattctaactttgtcaattaagagaatccatcgccccggaccgtaaactttctcttagtatatcgcatattttgaaagtaagtcgcaaaataaaggatactccctacaagcactccaataatcaaaatatttatagacacaacaattggaattacaaattcattcattatagttggattttcttttagagtcgcagaatcatttccagtaatgataaggtcaaagattccagatccaactagtccggcatagattaaggtaattgctacgaccgctcctccgacatttaccccgattaagttaacccatgcaagcagagattttatacctcttattttcaatcgtaagtttatttcaagatgattataaaaggtggccgtcatggatatgagagtaatcaatatcatgtaaaaaatgtaacctaagaatatccattttgcaggtccttcaaacgataaagagagaagctgaataatgttgattttagaggaataggctaactgtattattgtgcccgaagtggttgctacaataattagcatgctttgaagaattgctgatacaataaacctttgagaccaaatactcgtatttgatttactcaatgcttcattcaggtttgccatactatcattgtcacgttcggactaataagataaagcccatatatgggtttcttagcggttcaaatcaataaagtaaaataataccagagataacttagatcagcagagaattatcaatattcagtcctaaatacaaaaacagatccgatcagaatattatgggacaaaagagtaattatagggaacagtatcttcaatagtattaggaatatttccataaactattccacatgatcggttagtgaaacgtgataaaaattctactcgatggcaaatttgagatgagaggctctgatgtagaatttaagagtaaaaaatcaaataaaaagaatttgagaatgatataaattagaaattttactgctgcagtcattaaagaaagatcaaaagcatacatagctatgtgcaaacatcgagaccttaatccaggaataagaattataattagtattatagatcaccttgctaccatagataccgtacgccgctaaggcggtattttgatatcctattattcatttagataaaactggaagggatttttctttaaaaaaacaacatatcaactaatcagttatggtagttagactgacttagaaagaaccaaaatgaagattcaaatttgataactagcgtgagcctgattacaataagatatccacatcgtatagcttttcaacccaattcagtccaattactaaatataacagccgtatagccaataacaaactcgaacctagtacgtcatagatgcttagcattgtatcttgctgcaaaatgaccataaattagagtttctaaaagcagtagtaccgagatcactattatcaattatgttgtcgtcatcagagtaatgacaactttacgaatcttcttaattttttttaaatgagttggaactgatgagtgaacttccgtaaggggtaatggtgtaatagattctaattggttttcctcgaaaactttcagcttttgattttgaaatagcacccatcttttccagttcattaagatgttgatataaagtagatatatcgatttttagagaatatttttttacagccctcttgtgcaaattatatgcataatctggataattttttagtagtgagagaatcctagttttggtgtttccaattggataagcagaaatttttttatttttttcagatatagatcctcgttttattatctgtctgtgttgatatcgtatcttgttaattgcatcaagagttttccaattttttagaacatcgttgctgctaccatggcccatagttacaatacatacgatattttcgtcataatcatcaataccgttggattcaatcagtttaaataaaccagcaatcgaagaaacacctgcaggtgaagcaaatatgccatcactttgagctaaaaaagataccgcatccatcaattcgctatctgatactcttattattgatccaccactattgttgataactgtcattgcctcattttgatacgagtccatcgcgggtgggaaaagttctggtgcaattgttgtcaatgacttttgcagatccgaatgagaggtttgcaggttagaaatggaatgaactcttttgtttatatttttatttttgagagaatcaccaaaactattcgtctggctaaatcctgtattcaataacaaattttcttcagcagttacgccatgtatttttacattcttatttcttttgccattattttcaactaatcctaaagaaattaattctttaattgaatggtctagagtataaattagtgtcccttgacccaatgaaactattatgcggtcaggtaatttccatccaagttgctcgcatatctcaaaccctagactctttaatccttcggtaaaaaaagtattattgtagctaaatctgtgatagtttgaaggaaaaactttttgtttattagctaaattaatctttgtcccatagacaataagttggtaaagaacatccggtgatagtccccattcttggttatctaacacagataattcacagttaaaacctgctcgcgcagaatacgcagccaatgaaactgctagacgccctaccacactcccggttattgtgtttttgtgattattggacagcccgagccatctacacatcgagatttcggcagaagtccctctgtccatatatgaagtagtaggatttcgagtttcatcttttatccttaaatttattaaattaaactttgttcctatcttagagattctaagtggtgtaccaccttcatccaaactgacgactgacttaattatttcattatgaatattctgcgacctttcagaagtaattggtattaggttatagagatacttccaagaggtgggaggagaacttctaaattctttactgttgacatatttgtttgtgaggcagttatccaaccgtagtttaccattgcggcatttttcacaacttatgactggatttatttttataatattaaccacatttttacaattctcacatattagggggacatggagatccatttgcccatatatgggctagtttttattaatatatttactttaagtatgatcatggcaagtgcaaaggatattgtaatggagtattttcaagcaacggatcgccaagactggcaatcggccagaagctatttgagtgacaatttttcctacttgtctcctgtcaattcgtttgatagagctgaaccgcttcaggagttattggagaacctgattgtatattacaaattaatcgggcatttgactcattcttgaacggatgctcattaagccaatctcttacataaggaaatgagcaggttagtaaaataggaccggttccggtttttgcttatggtatttcgccttcgccatacttttctttaagacgaatatgctttatttttagcagcgcacattcatggggacgagcatctaaatcccaaagtaaagttaaagcagctttatttcttttataattatcatatttgacaatagttagaatatcttctttttcccacagttcagtttccaaatatgggctcaatctcttggttttctttttatctattttcaagaaggacggtgtgacccattcttttattggaatgtatatttctttataattagaatcagaaccttgcaatccgctagagtttttagtattatgtaaccatctatagaaatattttattctaccaagatagtcattccatgtttttatccaccttttatcaggatttgccttgtgaatccttgttgattcatgtatcaataaaagctattgcttgatctcttttattgatagattgaaagaatatagtaggttctaaaaactttccaaaagctataatggttttaaggttattattttgatatttatcagatgtaccagaggatttcataaattcataaaattcattaaccaaaattctattattttcattaggtatagtttgaatattacttacggttgtagaaagtttaactggcaatcatatcactccttgatgactatattcgttaatgttgatcttatatatgaaccctattactcagcgggcccgtggggattcgtgctgatatcggtattttaattaggattctaaagttaattataggaagacatacttaagcttttaaaaaataaacagatatttccaggaaatttcaagattatttaaatgaagagaactcatcataattaataaaactcacaaagttaatcaaaagaaatgacaggtattaccaatacgaaacacattacctaaattcatctcctttttcataggcaaatgtattactaggtcatttcatcaataacaacaatatttacttgttaacttttgataataaatacgatattagaaatatattcagtttatttgcaaaatactgcaataagcttaaatatatgcattattctaattgcttatggctatttttccagaagttttaacaatctcaggaaaaagggtaattattgataaatcaagttgctgttgtcatttagaaatccaatttcattggagaaaatagaaggactattaacagaaaccaattttgagttagagaaaagttatcagaggaagacaaaaaatgaccaaagagaatctaagcctgaaaccattaacgatactagaaaacggttttggattcatgcgcttagcgatgtaacagttagtgaagacggtcttgaagtcataagagatctgtttagtaacgatttggcttggataggtccggtatatcatttaccagagaaattcgatctaagagatttattttctccattaccggatgtccttcttataaaatttgttgcaaaaacggatgatcaaaataacgaatttttgcatttaattggtgattaccacttgcaagaggtgcctgaaaaatccaaatatctaaacgggtaccgttactttaagataacgaatcctgaaaataataatgcttaccagatcagagatgaaatagtaaataattcacaaattactttagatgtaaaatttgtaaatatgcctctaattgttccgacggctttggaaccaaatgatcccgattttcagaatcaatggaacatgatacggattagagctggaggaaagggaacaacagcctggaatatatcaacaggcaataatactgtcgttatatgtattttagattcagggtgcgatctaacccatcctgatctgcaaagtcgatattctatgccgggaataaatttggatactatgctacctgatgggtcacccacaggtcctatagatgaagctcatgggacgtgttgcgcaggcgtagtagctgcagttttcaacaataaccaaggagtggccggcttagcaggagaatgtcagataatgcctcttgcatttgagaattggactgatgatgaagttgcagtcgggataaacttcgcagcagataacggaactgacgtaatcagtatgagctttggaaatgattcttgggatacaaccataattgatccagccatacagaatgcgtttaacaaaaacgttgtgatgtgtgttgcaacgcataatttcaatagtgcaattacatatccagcaacaaatcaattggtaatggcttgtggagcgtccgatcagaatgataatcgcaaaacaccgcttagccctgatatggagaattggggatccaattttggtcctgagatgtcagtggttgcgccgggagttcttattccgacaactgacagacaagggtctgatggatatgaatcaggtgactataagagtgacttcaatgggacatcatctgcaacaccacaagcagcaggacttgcagcgttaattagaagtatatttcccactcttacaaatgttcaaatacgtgatcgtatcgaaaaaaatactgataaagtcggagcagtaacttatacaaacacacccggtcatccaaacggaacttgggatcaagaaatgggttatggtcgaattaatgtcctaaaagccttaatcaatttggaagatctatggattgcgtggaaaggctctggtaatgataacctgaatgttatgaacacaatgaacaaaataaaaaaattgtgttggatgaaacaagtgatacatctcctgcattgattgcatttaacagtagtttctggattgcgtggaaaggctctggtaatgataacctgaatgttatggatgtgtttaatccaagtagcaaaatcattctaaatgaaacaagtgatactggaccatcgttaacacgaaacgcagatctcttaatgattgggtggaaaggctctggtaatgataacctgaatgttatgcacgtatttgacccaaacagtaaaatcattctaaatgaaacaagtgatactggaccagcaatcatgcgattaaacagtagtttctggattgcgtggaaaggctctggtaatgataacctgaatgttatggatatcttcgttccgagcagtaaagtggtactcgatgatacaagttctcatgggccttctctgaccacattcagcaacagattgatgattgggtggaaaggctctggtaatgataacctgaatgttatggattctagtaattccactagcaaagttatactaaacgatactagcgacacagccccttcaatagctcacttcgatccaataccttaaaccttctgatatggataaaatgatatctgacatgatacctggtattgcactatcaagagaaagcaatgatacacatggggacgatctggatacagaaattgatactgacacagatagcattatacaaaacaaagaataactacacattcaaagtaaattcttattcttacaatgttatattcacagaacaatagataaagggatcagtaacaaaagagctgaacatggcattgaaagagtaaattaagaaatgtgaagaacaggactaattaattcataaaatattcaaaactaatctggatgcgtggggattaagttcctagtggtagtggggttctacactgatatttattttctgcatttcgacataaagcacagacccggtgtgctttgaatccataagataacggagagctcaagaataatttcttatttgcatcaaactttagagaacaaaggtgaaaaatctgcatacaatcttaccgaagttagtaaaccctcttcatttctatccgtacatgccactgcatttatagggatttcttttccatcttctaatacaaaatgatttattatctcggatgaaaaggaagaatccgtcacatagatatttaatagatcatgagtgtcttctttatataaagttcaaagtgaagcaagatgtgttataatttgatcttttccgcttacaggcggatcattatttatttgcatagtgcagtcatcagataaataatctttataagattcaatatccctctcatctatagcattcaagtatcctaaataccattgaaatgttttttctgatagttgattgattctaagtttatcatttcttatttttgtggccatttcaaagtcaagccactataaaaaataataatatttatgggttattttgtttttattaattttttaatggatatattataaaaaatcttcaatatttgtcagtagttattatttttatataagtagtaatgattcagaaaaagaaagagaaggaacgtattggaattgccaacatcccagcaaagaatattattatcaattaggatcccaaactctatgattatcactgttacttatgtaaaaatctgcagttttagaattgagatctgtgcaacgggaaacgaatagggttcaataacatttaacgggaaatgaattctttgatagaactgtatacattagcgcctaatctttatgaatttggtatgatgtatagtaacagtctgggtgcgtgggaatacgattcaaagttgaatagaatcttaacccatacaacattttaattagatgaatccacagttttctttcacagactctgcatttttttaactaattagcgatttcctatttactgcttggaaaacccacggtcgaggttcggtgcaaagagtcacagatctgtatctagtttgagattgtatttaggaatttaaaggtgttcttgatattgcccttgtattaactgctgatttattcctcttctccaccactgtcgtcaccaccttcacttccaacgctactatcatcattattattctgtccacctccattaatgccaccatcatcagtttcatcatcattagaatttcctaaattatccaaagtattacctttagtcacaaggatgtcttgatcattgggatctatcgctaaagctctgtcaaagtattcgattgccccagtagaatttcctaaattatccaaagcataacctttaccagctaaggcatccaaattattaggatctatcgctaaagctctgtcaaagtattctattgccccagtagaatttcctaaattatccaaagtattacctttagtcacaaggatgtcttgatcattgggatctatcgctaaagctctgtcaaagtattcgattgccccagtagaatttcctaaattatccaaagtattacctttaccagctagggcatccaaattattaggatctatcgctaaagctctgtcaaagtattcgattgccccagtagaatttcctaaattatccaaagcataacctttagtcacaaggatgtcttgatcattgggatctatcgctaaagctctgtcaaagtattctattgccccagtagaatttcctaaattatccaaagcataacctttaccagctaaggcatccaaattattaggatctatcgctaaagctctgtcaaagtattctattgccccagtagaatttcctaaattatccaaagtattacctttagtcacaaggatagaagtgtcttgtgaatccatctgcgctattgcagcaggaattacatcatattttccggtagctaaaaaaattaacacaaataaaacagatatgttcaataaaaatttaagattatccatatagattacaaaatttttcatcagacttgataatctttaattaatataaaaagttatactttttcatctaatctttaataggacaactgcaaagcagaacgtagactattttcaaacgaaaccatgttttcattactcagcgggccgtggggatacgattcttggttgaatagaatcctgacaataataaccttaaaattacaaagtatttcgaatatatcgaagtcttctttaggtaattgatcagtatcctctagttccttggttgctttcgatgtaattgtttgttagaattttcttggtttcattaaatacgtacagaaacttattatttaatcagaatttgatgagacttgaaatatttggaataataactaatttgttctaatcacactataattgattgacgcaaatatttccatgtttcgatcctttggttattagagtagatttgttgttgtttaatacagaatatattttcttatcatttatcaatctatgtgctaacatatgagtacagctatagtaagatttatcagatcttccttcttcatttgttgcaaaacaccagtttcggattgtcctcctttctttaagtttagatttattgtaattttctacatgactttaatcaagaagtaattcaccaagtgattctaataaatggaaaagttgctaagattaacgattgataggaagtatacaagatatttttttgaatgcattaaatcgtgcattattagctaataaaaatagttataaactaaaagaattaacttatttattcaatcgtaaactaatgttattatatatttttttattgactaaatacttattgaatagaataagtaaatctttaacgcttgatattaatataataaactcttcttgtcatcgtaatatattgcatcaaaaacctatattggctatgtttatcttaattctatctatgatgattattacgtctgaacatacaaggatcccaacactatctatagaataccagatagcacagggtcaaccaagtcaggaagcaccacaagtatatgatccagagataaaaattgcttcacctgaatatggagcgtataatagcgccaatacaaactttggtggaactgaggatgaagtatcagtgcaaagtattttagattatcaaaaactgatagataagaagatagtttgggcatatttttccaataactggatcgatgaaatcagatttcccgaagagtctgtaaaaataatagataacttggagatcgtcccgtttattagaatgatgccccgtactactttcgtagaaggaattgcagatcctgtttttactttacaaagtattattgatggaaaattcgacaaggagttaacccaatgggctttagacgctaagagaaccaatattccactaatggtcgaatttggtacagaggctaatggagattggtttccttggagtgggattttaaatggaggtgatgagacagataattatggagatcctgaggtaccagacggaccagaaaggtttcgagatgcgtacaagcacattattgacttgtttaataatcaagatgtaaataacataacatgggtttttcatatggtgccaccagaagatgcagggaatatagatcctagtgaaacatggaatagcataaaaaattattatccaggagatgattatattgattggatagggacaagtatttatggttctattaaaccaggggaggaatggaagtcttttacagatgttctcaacaatatttacacagaactttcatcattatcaagtgataaacctatcgcaatcctggaattaggtgtaattaatgatccacagagtggtgataagagtgaatggattcaaagtgctctgcaaaccatagaaagtgaaagttatcctagaattaaagctataagttattggaacgaaaaatgggaagacagtgatgtaattgacttgacagtgaattcgtctagagaggttgctgatacttttagaaatataatttcttcatccttttttttgacagacgctcaatatcaatttgatggagagaatcaatcaaattacgtggatgccttagctggtaaaggttatgcgttggataattctgggaattattcaggagctgtagagtactttgaccatgctttggacatagaacccaataatgtggatgccttagctggtaaaggttatgctttggataattctgggaattattcaggagctgtagagtactttgaccatgctttggacatagaacccaataatgtggatgccttagctggtaaaggttatgctttggataattctgggaattattcaggagctgtagagtactttgaccatgctttggacatagaacccaataatgtggatgccttaatttggaaacgctgaatttttgtttgttagtatccagaaagaaaattgttataatcacacattttttgtcatgatttgtatgagtaagattatttaattctaaatgaatatcattggatgttcgctcattaataattttttttatttaatcatttcacttttttctttagcttttcaagtatgaatttattatacttggtaaagagtctttcgacctaaaaactcagtgatcgaaaatgtcacttaagacattaaataatcctttgattctaaaacccccaaagtgacatagcggataagaattaattcgatatatgaaaaatttgaaaaatccataacagttacaggaccttaaacatattattcagtaggccagaggagatgagatatgtttacatgtttggtagtcaaaattttataccttggaatagggtgtagtcactaaagctattgattaaattaaataaaaatcgtgcctccatatagaagttctgagatataactaaaaaaatcaattaaactaaaagaaaagtgaatactgttataattgtgatatattttgcatattatattcttaaatgaaacaaacaccgaatcttaatagtgaatcagcccgaaatcattgataataacattaattggttgttgttttctgatattcgtataaaagaaggagaagaccagggagcactatctggctggaaggatttgaccgactcttctttaccttttatttatagcgaaatagtaggttatgcaataacatgctattcatggatttttttaaaaaagaataataaactagctttaactgcggcagaagaaagttttcaatggataagtaagaacatacaaaataatttgttaactgctggaaagataaacaatagtagtggcttcaatttaaagggagaccttcaaaatcaaatttattcctttgataatggcataattatagcaggattacttaacttgtacaaaataaatcatgattcggaaattttgaatctagctttaagaattgcagatggattaatagaaaagttttggaaaggcgaccgaatgttagcgttactagatgcttcatttaatcaaacagattatggaaaaggaaagtggtctaccatttcaggcccttatcatacaaaaatagcttttggatttattaaactgttcaaggctacgggcaattctatttatcgagatatttcgtgttcactatgtgactttggtttaagaatgcaggataaagagggtcgttttataaccaatacaggtaacgatcttacttatttacatcctcatctatattcttgtgaaggtctactttattcaggaatagaattgatggacaataattattttaaagcttctttaaaaggattggaatgggccatcaagttgatgtatacaaataatggtttgttgcctaggtctacgaaagagaatatcgagcaatcagactgtattgcacaattattgcgtttattgatcatatgcagatcaaagttgaatacaaatagaaagttggatatagacaacattatcgaaaatctcaggaatactcttcttaacctatatattcaaagtggtagagagatgggtgggtttagatatcaaagatcctttaatcaaatatgtacatggtgtacaatgttttcattacaggcatttgaattttacaacagcatgatagataaggatgatgataaattagcaatggatttaatggaatattatatttaaatatttaggaaggactcatttgtcctatttgatccattcttctcggcattaccctttcatgtaaaggaatgagctctccttttttaagaacttcgattattttttcggcggaatatccattaccgtatgggcaatcggtaggctttgactgaaatactggtaaagaattcaaaatattattaattgcatttttcattgcaacgtattcgacattacatagtactgtatgtcccgatagtattgattcatatctttctgtagattttcttaaaaccaatgcttttttgtttatttgaggtgctgttatttcttcttggattccgcccgagtcagtgataacaaactgacagtttttcatcagacttacaaaatcaaggtatcctactggatcaataattttcaaattctttcccgtgaacttgcccaggtcgaattcttttaacttttgcaaggtatgtggatgtacaggaaaaatacaattaaagtcaaattcagacaatacttctaaaactgttttgagattgtgagcattattcacattttcttccctgtgcaaagtcaaaaatacataattttctgaacccattacaatctcttcatatttacttaacttgtcctgttcattattgtcgaatttttccatactcgattctaagcaaagtctaattgcatcaataactgtgtttcccactaaatatatttgcccctgtaccttctctttttcgagaacaagtacggcttctttagtaggtgcaaatagcatatcagaaatgtgatcagtgacccttctattgtattcctcttgcatcttccagtcataacttcttaatcctgcctcgatatgaataattggaattcttaattttgaagctgttaatgcagtcgctataacactattggtgtcacctacgattataactgaagacggctgggataatttaaggatctttccagtttcggtgatgagcatggagaattgagagatagcatcgtcaggataatttaaatcaataaaaaaatcaggacttctcactttaaattccttgatgaaattcataaaaagattaaaactataatgttggccagtgaatatgaaagtgtattgtattttttgctcatcgaaaagtttcattatgggatagagtttaataatctcaggtctggtccctgctacaagtgcaactttgtgacatttatctccaatttccatctttaactgaaattataattcgaacaaactatatataatttagtatttgcgttttaactatttgactgagaatataaatatcgagtacgacttaaattgttcaatatccatcctttatataaaataatgttctaatataagtgatgaattatttcgtaaatgtatcgggattaaaagtattataccatttatgccacttaatgtttactcattttatcaaaaataaatttagtatattttcttgtataggatcaatgtattttgtaaggtatttgtatttcttaaccaaaggttacccgtcagataaattaagaattcgcaaaagctcgagcaaaaacctatgcatcacctcaggggtggagaccaatagttcagaaaccttgatcagtaaatcaagctttataccttacaaattatcaaacttttaggttgataattgcaaatgtatattaattcactcaacttcttgtagaagaatacaattgagcgttcctgctataattatttttttgtatatactagtatcttttactgtttttattttttctagtttgattttattgtatttaatgggtagcttattgagatcgggtaaactaaaagtagaaaacgtcaccgataatatatatgaattgaagaactttgattatcctgtagtatctattttgcttcctgtttatagagaagaaatttccttgccttttcttttaaaatccatatctgagctacactatccaaaaaataagttggatatacatttattgatggaacctgatgatgattttaccattaaatccgttaaatccattccatacaataatatacgaaatgggaaaatagaattcgcaaataacatgcccattaagctgcatatatgggataatactgttgttaaaataaattatatttatttggatccagcgaattcaagatcaaaaccaaaatcactcaatattggtttggtttcaacaacaggacggtatctaattgtatacgatgcagaagatagacctcagccagaccagcttttaagaatggtaatttatatggaaagacaccctgaggctgattgtctgcaggcaaagctaggttattataatacatggcaatctttgctaacgaaactgttcgcccttgaatatttgaatcatttcacagttctcttacctttaatttatcacaatggtttagttgtattattagggggcacaagtaatttctttagaaccatcgcactgaagagacttgacggctgggatgagaagaatgttactgaagacgcagacttaggtgttcgcctcgcacgcactaaactaataacattaccatttaatactacgacatgggaggaagctccacctaagctctatccatggcttagacaaagggtacgatggaacaagggatttatgtacacggctaagacccattttagagaaccactatccttgataaaagatattggattaggaagtactatctttttattttatcaattaactggaccaataattaacatggtatccctgctgggatggataatcttttcaatagtcttagcaaattttttaggaattccgttatatcctatttctgagtggatctcagaggcatataatttcaacccttttctcttttattctgcaatatttactttcgtaattggagttgcatttgttgaaatagtcagcgctcttagtctaaaaaggaacaattatgcaaaaagaaaatatttacttgttccgcttatgccattgtataatattttgttgagcgtggctggatttgtcgccattatagaatttatatttaaaccccaggtatggcataagacttatcatggattttcgatggaaaataataagatatagttagatagcttttgtagttaataatttgtctcttaatgaaagtaatagttactacctcaactttcttgtttcatgtttatacatttatttcaaagattaatacaagcagcttgaacgactttcctaaacaagatgctccgaggctaacctgcttctctgatattcgtatcatacaggttgttcatattatctttgtattagagacagcacgtttttggaatctattggacatcagatacaaaatttataaaatatagagcataagattataacttttattaaattcattgaaataatttgaagagttaaagtttatagtaatagttaaagatttttttaaatagaatattattatataaaaattaatgttatctaaaataataattgcagcagttatcttcagtgccctactatctgtagcaattgctcctctggtcaccaaccaagcctcggcgagaatcagtgaaggttgtgagaaaaatggtaacgttaaagaaggatcttgtcatggaaatactgacaaaaatggaaaggattcagtgtgtataaatccaaataaaaaacaagtttcagataacgcctgccaaaaataaaccctttttttgaattatttggagtattctactagcacccttgtaatacattattattatatcatgacttgatgacagtttaccctcattctaactgttaaggaactataacaaatttatcgaatagtttactcagatagtgagattgagagttctacttaatctttgactaattgtaattttaaattttaggtatgattgtatttatgaaaaattatacaaagacaattatctttggttatcaataatggagttccggctctactcattcctgttaagagtttttcagcactaaagttttctcgcttataactctttttttaacacttagattcgacagagaagagtttgacttttcgatcattgtactatcatactcatttaagtataaaaccctggcgaacattgatagtcacattttgaataaaatctgctgaaatatccatttagaaatatggagcttaccttatggaacgataacattttcaaattaataatatgcatatccacttcaagcatctgacaaatgatgttatgctatcctcatacagcaagttttacttaaatcctattaattagcttctccttatctgcaatcgtttcaaatcatcttgcagtcatctttatgattatttttcatcttgattgtttgaatctgtaaagatgacctgatatttataaaacaaattggcatcaataccagaatacgaaaatttaagaaattgtcactatttcttgctattaatcaaatatgcttaaatattcataataattgaaaaatcaatgtcatacatatatggtatattgtagaaattgtggtagagagctaccaactgaaaatgcgaagttttgttcaaattgtggaaacataacaagtcctaacagtaatgtagatactactactaattatgtttctgagaaaaagggatccagtaagaaaaaaattatcggcattgtacttggtattatagttgcattttttgtaatcattgctatagcgggagcttctgtaccataaggtacgctgcacaaaactgatcctgaaaaacctgctaagtcttccatttgaattgactacgtcgtataacaaacgccttacattatcgcttttagtagcggtaatattgatatggtcaaaattgaaaagcgctttcgctttctataaagattgaagaactatctcttaatcgtatgacattgtcaaagatttcggtgagccatttctagaagaaaaatttattagaactaatttcttttaaaaagtataaaaaaaatcaaaaattaagtagtatcgacattggaggcattatcacactaagcatttcttctgtactttttttaatcgtaattaccaattttgaagaaggtcctactgcttcttcatttcatttaacagactttcaaatcattttactttcaattagtttagtatcaatattgttattcattaattttgaacgccaatataaaaatactaaatccaatatatccaattctaatcacccaatagttgattttgctattttgcatagtcatcaagctattttgctgtcaattgtatgtcaatcatgacaggtttttaatgtatactataatacatataattcctattctttctaaaagtcccacgccgttgggatttggtaacaatgctatagaaacctcttatataatgttaccaataccaatgtcttcagtcgtaggagctactgttattggattttttgtatctaaaataggtgatccaaaatcaataatcataggtgcaatagttattacaagcgggttttttaggcattactaatttttacttaagcgaacaatatgtttcagtatctatttttgttgtttcaataggatatgtgttaatgcatatttcggctataaatctaattatgctatgtgttccaaaaaaaatgattggtgcatctgtcagtgttgcaatatatttgaaatatatcggtgctgccgcaagccctgccatatgcggaatatatatggggatccatctctcatcggtatttactaatagtaacattaatcctaacgggatactacaattatttccttcttctgaatcatatcagtttgtatttctatattgcaccactatagttattattattatttttattgctattatagccaataaattatcaccaaaatgtcaaaattattctagcgaagaacgaggtgagattggtaatattgccaataaattcattaatgaaatacaaagatgggaaggtatagaaattaaacctcatgcatttggaggatttcaatttaaaatagatggaattgatataggtcatatacatggagataagattgttgatctcccccctctcttcacatatccaactaaagatttctttattaaatgaaaaaaataacagtaatatcaaatcatctgattatcatatttatcctggatcaaaatgactcatatttcttggtattaatggatttcaaatttcaatatgactatattagagtccgtacacactaattacaataatatatgaatatggctgggcatatttatgatttaaaaacgttgttgttgagaggttttgtttctgccagattggaaccataaaggtttaagtttattttttgattacaattccgtcaaaagaatattgaccttgtaatttttcaggtacaacgtttaatataatccaagattagttgacgttaacgtatccaaaaaggcgcaaatcccgttaagtcataatatcattatcacggaaaagatcattgagtttggacgcgtggggataaggtccttgtggtagcagggttccattactgcttcaaagacatctcatttccaggatgttcttatgataaatcagctaactcttaattctggtctagttagtcccataatttgatccataatttatgattcacaacctaggaagacaatgatttgtatggtgtttgcagcaccatccgatgtttctatgagggaaaattagtaatctgactgaccaaattaaaatggtttttagtaactatcataaaaattagtgttgaaatctaaaagattcggaaactatttctaatttgattatatcttcttactatggtttacatggacctccatacggattacaaagactaaagggatcaccggtattaggaaggttattctgagcaccttgcgatccagtgttaccctgattatcttgttgttttccggaactcaagtttagtggttgttgttgttgttgttttagcgactcttgtatagatggattctgaagattgtcagattgaactattgtctctggtggtgttaattccaattgaattacaccttgactagtttgttgtgtatcattaccatcatcagaagtggcctgaacgcttggtatagcaaaacctgatgagttgcctactacaacgataattaataaagaaataacaactattgttattttgacctttctcatgaagtatccaaagaatccatgtatttaaagccgactactaagagagaagatttgggagtaaaatctaccttgttgatacttttctcttttctatctgttttaattctcagacaagtatatttggggtattatttcctaaaattatcttcattaatggaaaaacaaaaccagaatccattttaatgacaaatttgcttcacaaacctctggccccatattaatattctcgctttaatactttatattttatttgttggtagtcccttttagggtttcaataacaatgtgaattaaaatcattgggtgaaaaagaattaaaggaatagaagaggactaaaaagagagtttattgaaacaattcaagatccgaaagaaattctagatgtaattcgtaaaataatttcttagtttacagaagaaatacaattaataatttcaaataaaaaacatatcaactatttgaatcggactatgtataattgtgcttaattttgataaatcatatacgatatctagtaacagtctgggcgcgtggggatacgatttaaggttgaatccaaccctcactcaataaatcaaacaattgatcactataggagacaataacaaataataaattatgaattcagtctaaaacagatcgatggagatatgaaatgggaattttatgagaatatctattcttaatagtagtgaattgagatcgcaagtatgaatgattctatttatcattttttattagcctttagatagttgaggaggtcatgataggagggaggagtgctcatatcggtattctaaaaggatctcatatttattcatccaatttcgatttaaagattattgcaaatgatctaatattattgatctcgtgaaataataaccgatagcatggttatacagacaaaatgcttttctcgtatattaggtccagaaaaggatgttagtaaaaaaatccaattcatcctagtaaggaccgttagtgcatattatctagaatgcttatctaaatttattttcagagcctaacaaaaacgaaatcttaataagatctattttgcatgattaacccataagtgagaaaattcgagagagatgttagagagtttacgcaagtgctctatggacaatcagaaacacttgagatgtcatgtaaagtagtttcaagagcccaagaaagagttgatatatgcggagattctactcttccgagtgtttctatagaggtctcaccctggcatgaagaattgttaaaactcaaggatagaaatattgtacaccgtcagattacagaaatcaataatgataacattttttattgtaagcagttaatggaaatagcggatctccgacatttacccaatgttaaagggaattttggtgttactgaatcagagtattgtggttccgctacaatggtacaagcaaattcacctaatcagttgatccactgtacagtaaagtcgttcgtagaacagcaacaatcattttttgatatgctgtgggataaggccatcccagctgcgacgaggataaaggagcttgaatatggaattgaacctgaaattataaagacaattcaagagccacttgaaataaaggatttgttgattcacttactaaattctgcacagaatcaaattaaaataataatacccactgaaaacgaatttaaccgctggatttcttcaggatttttcacaattctccatgatatatctcgcaaaaaaaaatttgatgatgaaaagaatactactaactcatttaatcttcatcgtgactttgggtatccagctcgaccaaaatttattaaactgttgcttccatcaatttcatacaatccccaagtagcacacaagattgagggatataatgatttaatgattcaatgtaaagaaattgaaacaacgatagatgctaaatcagtaataataatttttgacaaatcatactcaattgcaatagaagtgaagaacgataatgcaacagagtttgaatctgcaattggttttgctacttatagtaacagcattccaacagttttttcctatatttccatgtttgaaagtttctggaaacaaacagaattggtagagaaattgaaagaatcagatgaacttcaaaaagattttatacgtattgcagttcatgagttaaaaaatcccattcagcctatagtaactttatcgcaggtattgcggtcaaagttcacggacaaagaagatttagaagttcttaatataatcgatagaaatgcaaacaaactaattcagctttccaacgatgtattagatgttaccagaattgagacaaaaactcttagacttcacaaagaatcctttgatattgttgaggccataaaaactttcgttaatgaatataatcaacaattgttgaataagaatatcaaattgactttaagatcaattgaattcgacagatattttttgaatggatatgatacggatgaagaaatatcaaagattcaggcgggaagcgaatttagagatctattaaggcatgtagtttacgcggacaaagatagaatattacaggttatgtacaatctattaaacaatgcggttaaatttactaacaatggagagatagatgtatatattttaaaggagaatcaaaaaaatactagtattatccatgttagggattctggaatagggatagacgatcaaataatagacaagttattttcaaaatttgtaaccaagtcagagagaggaaccggtttgggattgtttatctgcaaaaatttgatagaagcccatggaggaaggatttgggcaaagaataacattaatcagacaggcgcgactttttcattcaccttaccttatgatccctgaggttttaatgatgccataatatgatgcaacaatcataacaagttcctgtaattctgctaatagaattaaagaaacttagtggaataaattagtctggacccgtgatgatacgattcaatgttgaatacagtctagcacctttaaaggaacgtaaataaataatccatcctaatgtagagaactgaattatgtaatgaagaatgtgatagactacaaaaatatcagatataagtcaaacagaacttcaatgtaaatagaaattaattgtcactgaatttctatttcatggaatacatctatcgtaatgatactggcctcacaggaggcaatcatacgaatcttatgagaaataattgaactggatcaccaataatataccataatttctattcatatttcttatctcaatcttacttattgaggtgaaattaataaaactttttaataaaataaatgtcaagtatataccagttggatgatttaacatttcgacagttaaaggagtccagatactatcaacctgaaattacagacgtgattattgatcataaaatgatgcttgatctggttgtggatgctgtaggtgtcacaatgaagggctacgatacggtaatagattcagtcatgtataattttctattaaaatatttcaaacacggaattgacctcattgataaacgcataaaagaaacaggagttaaaatgcgaatgattgttgacgcaactagtgaaaatattgattcactaaatgcgataaaattctacgaaataaaacatatagacggaataagagggaattttggaatatttgacaataaagcgtacatggttttcatttttcataaagaaagtgaacagcctgaccaaacattatggagtaattctaaagaactggtagataaacagcaaacattatttgataaaatgtgggacatggctatcccactttctgtaaggaatagggaattaaggtatcaacagtttccatcgtatcatgatgatattacgaatttgaatgatatcaaagaagaaatcagcaatcttatacagcaatgtagaaaagaactactgataatttcatcagtcaagttattgaatttaattctattaacatctgattttttaagtctaatttcagttgtattaaaacgtggtgtaaatattaagattctatctaacactattgatacagatattgagaacaaatttaattttgttaatagtcttgaattaggtggcgaaatacgatatggatattcaaatcaattggataaaattaatgaattaattttgattggcgatggcaaagtaatgctacggtccaaacatgaaccatcaaacgaacctgtagcgcatttgtctactgacgaagccgatgtactggttcaagagatattatttgaaaaatcatggaatgaagtaaaaagcctagatatatcgaatagtaactaggtttttttagataataacatttgcaaatcaaaagtatacaaaggtaaaagtcaagattgtatttaatccaacgactcatcatataataaatgaaaatagtggtatcgacttattgacctgatattaataggtgatcaattttttatcatctcaagactttggatttcattccaatatttctcaaacaacacttcttgaactaaaactgtatgttcttcatttgaagataatgcaaatattttcccatcttgttggtgttttgtttgcaatacttgttttccatctgttaaaactaccatttcattaaaacaacaaaggcttttaccatagccatatattatgggattatcttcattttggagattcaattctgaaatttgtcttgaaaacgtttcatcggtttcatcggttaatattttaactgatactcctctcttctgagcagattgaattttaccaatattatgcctattcataaataattgatttaaagaccttaaggatgaaaaaattagtagttcttttctactttgttctaacgtgtagtcaagttcatctttgaattcatatatgttactgatcattcgctgatactttggttgatcattcctatctaactcccttattcggacagaaagtgggatgctaatttcccataatttttcaaatagactaacttgtctctttactaagtcaggactattactaaataatgtttgatcaggtaagtcactcttttgatggaagagatacaccatatacgccttctgatcagtaatgcccatatttccacgtaagttatccacatgacggatattcggaaactttaatgagttgacgcggtcaatattttctttagtagtttctacaattaagttcaattctatttctccattttctatttgcttttcaacgactttagttccatcttgaaaatatttccacgcagagtcaaatattggaggatcccatacggttaggtggccctgttcagttaacggaagacctcttctcacaagttcatacatcgaataaggatcagaaattatatcagtaattacaggatttaggaaattagattcaatcaattgatcaacggttgactcatccacaaaaccatactataacggaacgtgttaaaaacatcgcggtagcaatgacaattcctgaggtttaagaatcttgtaatattcatattgaatatatctgtgaggatagggttcaaagttgaacataatatcagtaaagtgatgacttataggggtcaaatcttaaagacttaataaatttgtgtacctaagttgatcatttgggtcaagatagttttaattttgatactgacgatgcccacctaaaaaatactactcatatcttgtatgacccggaaattatacgcaataaaggtgtggaatttatacaaaacgtgaatgaaaggatggatatatgcgtagacactaacgcaccttcgattatagtaaccattcaagattattttatcaattatgcggcacttacaaaaagaggttgcaaaatcagatttctaactgaaataaccaaagataacttggtatattgcaaggaaataatgaaagttgttgatgaattccgtcacttagacaatatcaaaggaggaatagcagttagtgaaaaggaattcatgtctacaacacaaataattcaaaaacaattacttattcagtgtatatatagcaatatacagccagttgtagaacaaggtcaatatatttttgattcattttggagccatgcatttcctgcaatggatcgaattaaagaattagaaaaaggagtaaggcgtgaattcattgagactattcgaaatcccaccgaaattgaaaaattgataaaacagatgtttcaatcctctattgatgaggtattaataatactttcaaatactaatgatctccataaacagaatattgaatacattatgaaattattaacagaattggtttcagtatcagataaaataagaattaaattattgatgcatcgaagtcagcatactcatgttatagtaacaaactatttgtcagattatccaaagatggaaaaagttgaaattcattatttaaaagattcatttaagacaaatttgatgttattgatttcagacaaaatgttatctttagcgatcgaaatcaagaccaaggaacaagaaaatctttatacaaaatcattaaggtcaattggattagcaacatattcaaatagtgaacctactgtaagttctttcttagcaatttttgaaaatttatggatacagtcagtaaatagttcatgatctaccaaatatttatctctggttgaatatatctgtggggatacggttcaaggttgaatagaatccttttatccatcgatattttcatatcgtataagaagtaaaactagtcgatggtgaataatccgcgattattatttttggtcctgatcttttctttacttatctattacatccgtggggattagttccgatatcggtattttaaataggttttcagatgaagaaaaaatatcaaacttaaagatcatttcatacagatgaacaaaatattagtacttgatgtttaaaatcttgctcataattctaatcaaaatacttattaatatacttagaagataatcctattttcaatcctgactacgtatttatatagatcataagtttcgatacaaagaaattatatatcatgtaaatggagataatatacaatatattacaaaatccttaaatatggtaagtaatagattgttttgttatggatcctaaagatattccatttactcaaagggcgttagttttacagggaggaggagccctaggtgcttatcagttgggtgtattaaaagttctatgtaacaaggttgctaaagaatctaaaaatagagctagcaaagacgcgccattgtttgatgttatagctgggacatcaataggtgcgataaatgccgcagtactgataggcaatgtggtaaacagaaataaaacctgggaacaagcactagaagagcttgaaaatttttggacagacgaggtaaaaggtgtatcatctacacctgatcttagcagatggtggtggactaaacataatccaaatttctcaaatatgattagtgtgtctaaagatgctttaacaaagtattattcggtaaaggagtatttaaaacatggaacgcctaatgtgtgttggcctcagataccagaatatgattccaaatttggagatttagagaatatatggtttgtaaatagtagtgcaccactacaagatactattgaaagatatgcgaaacaagaaaatagtaaagaattaaggatagcgactaattgggacaggagggagcctcgtctacttgtagttagtgtcgatatagctgagggaaaaacaacaacatttgatagttatcacagaaaatcaaaagatcccaaaaattcagcatatgaaggtgatggcattgatataaatcatatcatggcaagtggtacaataccaatattttataaatttaggaagataaaaggacatcaattctgtgatggaggtattttaagcaatactccattcagagaacttttgcaagcacattatgattattggactagtatagcaggcgaagatagtgatagaattccagacctagaagtctatatcataaatttacatccttccaaaataaccattgattctattccacacgattatgatggaataaaagatagagtaaatgatatagtttattcggatagaaattctcactatactgagatggttacagatttggtaacagactatagagacttgatcgataaactaatagatctcacaaaaagctatgtagggaaagaagagatcaatgcatttgaaaataaatttgagaaactcattaataaaacaaaagcaaaaagtaagacacatacaggaagagatagaacatataaagatcttttaaaagggcgatttagactaactaaagtaattcgaatagaaccgaaaagctatgataaccctatttctggcaaaggatcagattttacctccataactattaaggacctcataaaaaaaggcgaacatgatgcgaaagagatccttaattaaataattgtatctcaaagaaccagtataattactgagattcaattatttcataaagaattagacaggggtcatttagaaatattaaatggacaagaaccggcattattaacaaatatcagatcagcgagtttgggcgcatggatattaagttccatgtggtaagagggttctatgacataaggtatcttaaaaagaagatatgtaatatttaatatcgactagaaataaaaacagacatctggattaaaatcatgaatgtatttaaagaatattttattacttattagttggattacatctaacctattttgttttatgtagttaaataaatatgaattcttaatacgcatatgctccttcagcaggtctacattgattacacaaggtggttttttcatctttgttgttctttgttatacttacggtagttcatcaatatgtccatctgcctgtggaggtatgctattccaagtatctaccacaatattcatcgctccgtcatccatcaattttgttttattcatttcatctagatatcccatatacccattgtgattatctcacgtggaaatcaaatttccctcgggaattagtgaatccaatattccatctctgtcagcgtcacaaataggcaatatctcgtttcttacgttaaattcatggtaattaaggggtaaagatgctgaaatagaggaggggtatttttgaaaaccactttgccctaatgccaaatctcctgattcgtatgatggataaatttgtaagtaggattttggttctagataattatcatctggattaaacaggttgtaaaactctattacttcattttctatagaattcccatatgcttttgactttatggttccagtattggtagggtccaaaaagagatcatttaattccttactaacttcttcgttatctacagcagcacctaacaaatggactgatgtaattttattactatcattagtccatcttgtatcattatgcaaactttctaatgcgctaagaattactcttgcgccaagtgaatgacctattaatctgacctccgtattctcgttttctttcttgcaatcctccaaattttcaattatgtagttagctaattttggtccattttctgtagcgattttcttagcattgatccatcccatccagttcaggtctgcataagtaatagtatttgaatcccagctaaatccaactaatgtattgttgaatccatttgactgtaaagacaacaatgttctttcaaatttcttatttgcatttgaatcatcggatccccatccatgaacaaagatgacaacttcaggataacagtttgatagatttaatcgggtgaaatctgtcttggtatggttatcaaatagttcccccgacttaaggctgaaatgctctcgagtagagacgactggaatatttttactttgaccccatgctaatgaagttaatgagttgatgtagaatgaaactatcaaaaaggtaatcatgaaaatttaatattgcttttaattgccatctaatggaaatagcgaattcaacttaatataaactcgtgcaatatcaattattttaatcccagcgacttcgctgaaaatacatcgtcattgactattactcaacgcactcgttcagtcattacgaataatcattaagtctgttttaattattagcatattctatattctaagacgacagaatacaacagatttatgataattggatatatcaatctcctagagttatatttgtgtcaaatttatcgcgggccagtggggattcgtgccgatatcggtattttaaacaggattctactttctagtatgtcataaccaaatttaaaaattactccatcgattattaagaaattaagtatccaaaatttgaggataataaattgatcctagatttcattgatacctacagtatactataattattcttccatcaaagaatgattaagatcatatgcagtaggtatagtaagaggctttaattgatccctagtagacatagagagactgttgtagaggtaccttaaatgaagtcaagggatattccaaatcatcaataatctcttcagtagggatcttgagtattcctaaatgtatgtcaataggaatgggattaaactcataatcatctattgggtctggttgaaataagaatcgcggcatagaaaaaggttttaaccatactagaatttaataattgcaacatactaaatataatccaaagtaatatgtatcatagatgtagaacagcatccgtggggatacggttcaatattaaatatagtcctctgcatatagtgaatctttctcgatatcaagtataaattattcaaattaaaaaattatattgttatttcttattaccatgaacttcattcatgacatattgtatataatcgactatttcgggttcagtcagcgacgttttaactccggatgcttcttcaatttcatcttcaagattttttgcaatagtcaacactttggattctaattctttatttctttgagcagtaccaagaccacctagaaaattggcttgttcagttactgatttcttaatcgattcttaggagagcattatcctgagaaacaatttgggtggccgcatataatcctgtatagataaggtagcatgacaagccaataagagaaactgaaactagtccataaggcggataagcggcttgtacagcaactgcagttccagtaatatagaaaagtaagaatccgaatgcagtcaatatcaactgagttctgactgcagtacccactttcagagttcttgcaattgataagaaggagatcccaaatataatgcctgcaagaattccactaaaagagaaaatgaggatattgaaaaaagcatttgcatcatcacccacattaaaataccccagggtaaaaagaggaaattgtatattgtaataaataagagatataatcataatagaccaaaacttgagtcttccaattctaggtaggtgcctatatagtaattttacactgcctatccatgttaagataaatgcaactagggagcaaccactgttaattaaattaatttgacttcctaaagccacattactaaattcaggaaaatacgcaacatcacctaaagagatgatcggctcttgttgtgccaatacatccaatgtatacatcaaaccgaataatccatttgcaacatagaatatcatagcaagtgtaaatattagcaacacactatttttattaaagttcttataccatagaatgaatgcccttgccaatagtcccattatgccgatccaaattccataactaataatgtgaataatggatagaaacgaagtatggtattcttgatatatcacaatctgtagaacaaccgaagttaacattattgcaattagtatttgcaaaacgaatattatgttaaagactagtttgaaatgaatatattttacttccgtcaatttttcgatacttctaataagataaatgaaatagaaagacgataaaattagaaatattgtcaaactgacatatagtaggatcccatacaaagaagatatgttttcgacaataaaatccgctacaatgccgatctgagagtctatcataatggcgataaccatggcgacaaagacaattaaaatcctattatttttggatttatagaaagatactagcctatcaaacatttcggatcatatttctaatccttatctaatgctgttgaatttaaagaattatttatagatattaaaaattagatttagaacttcagtcatagtacaaatcgaatattatgtaatgtttaggtattattacattttaatgataaagtttttctaaatgatttaggagatggaataaaactcaaaaagttaaaactccgagaataggtattccatacatctaattgtattatctcagtttgaattcttccgtggggatacggttcaatattgaatagaatctctcccaggcgataatataatctgtcatacgaactataattatgttggaatatgataacacttctgcatttcttttgtatagtgaaagacttaaagaaccctattacaattctcggtaaatttttacttttcttgacgtcagttgattttgaagttagattctggtgactaacagattaattcaatgagtcaacagtgatattgtcaaaatgaatgtgtgataagaatgaagtggtaaatacgatcagtaagccaaggatggaagatatggtaaagttggttccatgtaaggtcccaatgccattagattggccggccattgtattctaaatccttgttcaagtaaccacataacaatttctctgttttttgcaggtacaaaaaaacctggtcctgtaataccaaatgatcctgcaattagcgctttgagatcatcatttgatgaagcgatagaatggccaaagagtcccagtcctgcagaatatccacgaatttttccttcccgttctatttctattgcaactccttgacttattgcttggtgcaactctccctctctcgcgaatccatgggcccgggtgcaaagtttattacattccaaaatatcttcatctgtttcaaccttgtgtaacttcaaatcgtttatatccaaattttcgtttgacagatttccttgcattaagaagagtggctctcgtaaagtaaaacctgattttgtatatagtacaaaggaacgaatatggcttggtgattgtactaacctgacttgatcgtaattttgactataagcgtgagatactacagcattcatcaatacactacccaccccactaccttctgcagcaggatccacagttagtggcccaattactgctatcggcgatggaggaaatttatgaaggaaaatactaccaagaatctgtgtgtccttctccgcaaggataccgtatgagttaggattatctaagagcatcctgactaatcctattgcgtattcttcagatggttgttcggatggatatccatgagcagacgatactgcgttatgagccctgaatccgatttttccacagatctctgcgtctgtttctacgatgggcctgatgcttacagacatgataaatgacttcgtctagtgcttattataacttctgaaactgcattctttcctaactatatccaaatccttcgattgtaatataatttaggactatttggaataggtttacaggtaaatgttgaattgtttaaagaatcgattctaacaagggctaggaattagcgtaatattcaggagggtcttaacatcattcccaaataaagtatcatttagtttgggcgcgtggggattaagttcccagtggtaactgggttttacgacgtttccaagaagatttaatattctcaactaacagatacgttatattattatgttgaacgacaattcagtatattaaatgattagcatggtatcattaaaatgacaatatcggtatcctattcaatgatgtaggttgacatatctgttttaattcctgttgtcatgtttataggcagaacagcatcaatctctaattatgaaaattatccatattaagtacgaattctatttgcaattgatgcgttaatattattcttaataacatagtttcattccttcaactaatcaagtggtaatctattcaatgtttaacagaattaagaaatgtgcgttttttagaaatgctctatcgcaacatcaccggttgtgcatttactcgtatacggaacaatgtataaggctttatacgcatatcttttcccctattataacgtgcttgacgatgcaactgattggcagtaacataaagatatccatcggttgcaagggaaagtgtatcaggccataataggcgatgatcgtatgccaaggcctcccatacattatctgaatatctaagtcggagaatagcgttatgctcataattagttgagtatatgtttccttcagtatccgattcaagaccgtccgaagcacctcccctgtctccatgattttgtatagtggtggcaacgtcttcatcggaaatatcgcggttaacaagtacatcagtggccacactgtacaatttacgacttccaagtggacaataatatagtctagagccatcagagctgattgcgataccatcagcacccatgcctgctccctgttttatagatccattaggttgatgctctagaaatggtcttccttctacaagaggaagaaatgttttgatatcttccggtttagtagtaggatgatcattaagtcgacgccagctttctcctgaatgaagatcaactactattattgcattgggtcccttttgagatgaatctgtaataaatgccatcccgtcgtttcccctgcgtaaatcaaagcgaatatcattgaggtaagtggttggttgagcaactgtttgaggaaataagatcttttttactactttgttggtatctaaatttacacatatcaattttggaccaccatattctgtgggcttgaataggggactccctgtatcaagaatccacaaccgatcagccggatctacaactacagattggacagacacgagtgttgatgcctgatcttcttgatctacttcgtttattgattcgtcaggataagcaataggctgaccattctgaatttctgcaactgtaaatttaacgtcgtctccccattttgggaagtttacaaaaatgcgtcctttatgagatactgtaacaccggttggcatggcatcattaaaaaaagctacaggttctaaagcacctagcgattctgaggagggcaattcacctgatggaatatctttagacatggtggatttttcaaaattatttgacatgatatgtaatcaaaaacatattactaatagttataagatatagagattaaagggcaataataaccacatttactattgtaaccatgttgtgtttaaccaatatctggagaattaaggatgtaccactccggtcatctgcttttttagtgtctattactctactgaatatatttaactattagagtttgtcttaatatatgaagttacatttgttatttacaagtatcatcgtcatttaaaaaaatgtttaacatatcaaattagattaccctatcttattctatggtttcaatttcctctacattacatgcagcacattttgtccttattagtttgtctcgcaaattcagtatgatccgccattatggtcttgaaaatccttttttggtatttgttattaacacttgttttataacaacatgtattaattatggccaaggaatcaggcatagccaaatcgataggtgatcagaaagaggatgacattcaggaagccgatcagttacttttcaattatttgaaaactggacagaaggtgtcaaagaatgaagctaattataaagaacaacaaaactatgataatgaaagaaatagaaaaccatcttgtgacaagtgtaagtttaatcttccagccgagcaattatgtcatattgtagatggaaaaatcgataatgaacatggcatatccagatacttttctgctagaggtgatggaatgcttccaggagatattgcttggcatcatgtaaaaaggagtggaaagttagattatgaaaaaggacgtgttattaaggaagctctgcaaggatttcaatgtaaagattgtaaatattatatgtattcacatagatgcttaatattaaagggcaatttagaaccggagatgagttgtgcgtttattgtaaaaaatggcaatgggatagaagtataattaggtaaagaatcacaagatactaacgacataacagctaaagctgtaggtggaagttagatatagatagtcttttgctgtaggtagatagttacaattttttcgctaagcgtagccattagcgaattgattgatattgtttgcattgaaagactatctcaggtaagaaacacgaactcttaatacgcgtatgcaccatcagccggtctacattgattacacagggtgattttttcacctttgttattctttgttatagtcattacttccacattttccataccacattcaccacatttacctttcataaatatccatagttatgaaaccttaaaagagtaagcaaactttgtgagaagtcggttcattcgaatactttcatttatctccaaatagtgactaactaatatacggtaatgttcaatatcataactagaagtctttcttgatatgatactattaaaggaatggggtgggaacatgtgtcaatctgctcatatctatgatttcaatataattatataggcattgcgaactaattgcaataatctaattccaacatatttagaatcaaaactcgaagcagttgaaatggttagaccctgtcgggattgtaaatatataaaataaatattgatagaaaatatgttaaatgaatctttttggtgacaaatttgttaatatattaaacaaagatggcgaagcaaactattatggaaagataatgtcaacatcagaagcaaaaacatactatgatttgttactaaacaatataaaatggaagaatgatgaggctttgtatcaaggaaagcacatagttacaaagagaaaagttgcctggtatggagatcagggttttctttacacttattctaacactacaaagcaagcaataccatggaccaacgagttaatagatctcaaaagaaaaatagaactgatgacaaattcgctgtttaactcttgtttacttaacttgtatcacgatggtaatgagggaatgacctggcatagcgatgatgagaaatcagtggggaagaataatgttattgcctccttaagttttggagcggaaagaaagttttcatttaaacataaacgcacaaaacaaacaatttcactgctactagagaatggaagtttgcttttgatgaaaggtagtacgcaattaaattggctacattccttacctccatctagtaaaataattcatccaagaataaatctgacttttagaacaattagagaccaatcaagccatgacacaatgttgacataaaaacatcttaccttcgctatgaataaggctgtttttaccatatcaataataatcgtaggcgagggaagtcgaatggaaaagatacaatcgagttcactagccagttagagttctatggtcctgaacagtatgacgaattatgggatctgagtatgtctatcggttctcaattatttacagaatatacataattatggtaacagtctgggcgtgtaggggtcaagttccgcatggtaccaaggtttggtcatatgcgacctacagtatttgaatttatgtgttagtaaattgtaggtgagtctttccagccttcatttaagttatcataatatttctttcaagtagtaattacttaactatccactatctggacatgttcacttctctatcaatttatatattaaatgcaaatatcaaaaacaatatcaatatcgaacagttaactttaagtacaataatttggactctttttcccctcatactgatataatttttatgaccatgtttatagttcaagcaagcagtctattttggctgatctattttgtgatcgaatctatcttatccatcataaaagtaccaaaactttcatctttttcaaatttacatttagtcgactttcctttggtgagcataatccttccagcaagaaatgaggaaaaatatattgaaaaatgtcttgaaagtctattaagtcaagattatcctaattatgaaataatcgctattaatgatgattcttctgataagacaggcgaactgcttcataaatatagtattagtcatagtaaaataatttatattaattcatcaccaataccaaagggttggacaggaaagaattgggcatgttaccaaggttatcttaagtcaagaggaagtctttttctttttactgatgcagatactacaatttcttcctcgacgttatcgttagccgtaactgatctaatatctgaagaacttgattctattactgcaattcctaaaacattagcaaatgatttctggaccaaaataactttaccaatactatggattttttcggcagtaagattttcaccaataaaagcaaataatcctaaaactcgcattggatttttctatggcagtttttttatgatgagaagacaagtctatgaaattgttggcactcataagatagtaagcggagaaattgcagaagatgcagaattaggaagaatagtcaaagaaaaagggtatgcgatcagggtgtttcacggagaaaagcatattcaagcactttggtcaagaaattcaatagatttatggcatggtttgagaagaatcataataccattataccaaaatgacaggaaaaaagctttcatactaataattacaccaattgctctattgatattacctttacttatactagcatttgtaatcacaagtgcaggttttggaagagattttttccttaatctaccgtcgttatatttggcaattgcttccattctattagtaatatcgaacaacgtgttacaattaagatatgtcttgtttcaaggtttacgttattcattggcctttcctctatcgggttctttattgctggtcgcttttgcttcccctttagttaggtcaaaacaacgggagttaatcaaatggcgagatagaatgtattctactagaataaatgataaaaacaaatgaatttaaaaatattcatcattgataccaaaagagggtcttttgctaatttctaattaaaagtaatactccctaacagaatactcttcatctccgtaggcaaagatcgatatatgctgtgataggtctcttattaacactattttttatattacttagtaatactcggagagtatcttgtttaaattattttcaaattcttctctgttttgaccatctattttattatttgtagtagtctgctcttctaatactaggttattgatggctttatcgatttcagccaatccgatcaaggctttattcaatctattagataagaaaaagacggttgaaaagatataactgattttgtcattatcaaattctagttttgtagatgatggaaaaatggtgtccaattcttttctcaactccttgctacaatgttctatacattgtggatcacctttgcaattttgtaattgttgagtccaagatgccaggcatttgattacttctgtagaataatttgtcataataataatgaattaatatagtacttatagtatgattcagtatgcttctctagacttgaaggtctaggtcgaatcaggaatcattggttatataaaatgtggaaattataataatagaaagaatgtcccgtgtttctttttcgtttaccgaaagtcattattgcggcaaggaggaatgaccaaacacggaattagctaacaatagcttatctatcgactccaatgtcaatatttgttttatatcttcatccatggaagaatactgtattgataagcattaagaaagtaacagcaactcattctccaattcacgatatatgaataagaattatgttctagtatcaacaatccttaattaagaaactgactgacttgttaataatctcctcagagatatcaacttatagtatggctcgatgcattaaatagaaaacttaaattatttgtccttcccataagttcatactttaattagaaaaatgagaatttttcacaatcattctatctttgtccatattaagtgaatttatgcggtctgattcaaggcttatttgttctttggaagaacattttgatcatatctgttttgtttcacaagtaaagccatttctaaagcacccttaatggtacttaccaaatctttattcatcttagaatttttacgttcttttgtagcaccagtattcatattcaagctagagatcatttcatcatgattattttccgtatcttcggcataccaacctctagtccatccaacaaagggaaatttaccaaatacaaatcccatctgtgaccaaaatgacattagttctccagctatatgttgaacgttgtcctgacctccagtaataatgaaggcagcaaccttatctcttataagatatcgattatgtgtaatcatttgattttgaacacagttcattctctgaatcattttatagtacagcgaacttgcactaccccatcttattggagtagatatgaagacaatatctgcccacagaattactttttcgtaaatttgtatcatctgatcttcactgtctctttcagaaatagaacaaggaaaaatacatgcattagcgttttttgaatagtaaccttcgcagtgattgaattctaaatctcgaagtttaatcataactgtttccgcacctaaattgttttttgcatatgacaaagcaaaatctaatgcggtctctgacgtgctttgacgtggcgcaatctcatcgtttgcattagtagtagatataccaagaactcttatttttttatcgtctacaggaagtacactatcattagatttatgattcaaatagtcatctactgattccttcaatttcaaataggcttcatgaggctggaatattctttttccaatgatggtaggaatagaacttacatatattttgtcttctattattttgactggataagaattaacgctatctccgcctttatggggagatttaccagtcttgacagaatatttccacccatgccacgggcaagtgactatatctccattgaggaatcctttgctcaatggtcctcctttgtggacacaagaattagatattgcataatatgttccatcaagattaaaaactgctatttctgcaattttttcttcttcagtttgaattgaaaaactcttagatgatccactttttatgtctgcggttaaacctacataatgatacgaagaattattagtatctaatccttctccttcatccataaattcttatagataacataatatatctaaagacatcgtattcctgatttaaagctcgatcaaaatttaaatacaaatccaaaaaaaggtagatgtttcgaacttagctttgagcagctgcgttgctaccactgtttgtttggctttggacgttgatgttgttaccagagcctattgtgtctccaccagataccacattgctggattggcttgaagattgggattgactgatgttttggtctgcagagtttccacctttgccgtcatcatcatcttgtgctaatgcattgtttcctgtattcttttggtgttggaagcttacattgttacatgataggaatgtggttccaccagaagcacacaaggcattttgaactgaagcttgtgattgagatatggattgctcagcatgattgccttttttctttttggttgcaaaggcatcattatccatcgctacaatgggacttgcgaaaagagctaatgcgaccactattgcaattgatgctacaatgagttttttgtttttgttgtgaatatttgttttattcatatttttgctaatatagaaaaaatatattgcgtttgctaactaagtgcaatactctaatattctagcagttttagaattaattaaagaaatcagaaaccaatagggttctatagcatttagcaagaaataaattctttgattagaatgtgtatattagtgcttaatatctgataatttggtatgatatttagtaacaatctgggcgcgtggggattaagttccctgtggtaatagggttccaatacattcaaactaaaaccaactaccgaatatgaaaaattaatttgattaagccacaatctataaccgatatgtaaggatatcaagccattaaattcgactcataaacatactttctttcaaagtcgttaagattcctatatgattaaggatttgattataaatgaatacttaaaatcacaaaaattagatattgaaatttagtaatcttttacttcttctttgaacttctccttattgtactgtacccatgtccttatcagggtctttaattttatttcccattgccttagcacctgctttaattttgtcccctgcttcgtctaacgtgctttctgtatcatcagctgtatctcttacatcttcttgaagatcgtcttctctgttaagcggttcttccgacattgtaattgctagtataacaatctatatagcctatatcactaaatatttccaaatactttggttattttgtcatttcagaatatacgtttgtactctcgactttgtagaactattttaagtatgatatactttcttgggtgtataattagagtggttgcaaattttaaaatcttaatggtctgtactgaatatcctcccatgcaaggtggtgtaggtcgttatacaaacaacttggttaattcactgcgctcaaataatatagatgttacagtcgtgtctagttcagatggttctggcgactacaaaggcatctcaccacataacaagaacaattcagaactattactacaattagtaaaagagacgaaagcagatatagtacatgtgcaacatgagtttggactttacggcttttacctaaattctttagagccatctaaaacttcaacaggtcttgataaattctatgataaatgtttaactccaatagtaactacttttcacacttcgatgtactttaagcaatggatgaaattaagaaacattaaagaaaaagataatgataaggattttctaaggatcttcgcactttataaatactggcaacatttcattaattattcttctatgcatagaatcaacaaagaccttatgtctaagagtgtatatggaattgtcctttcaaattacatgagagaattaatacccagaacaaatgtagtatatcacggattggtaccatattttaaaaatgagatatcacgtattgaagcaagaaagaaaatgcatcttccagagaatggaagactagccttagctcagggattcattactaatacgaaaggatgggatataataagaaaaataagaatgccaaaggagtggagactggtagtaaactattcaaagaacttttataacaatgaaaaaatcaattttaaatttcatgatgataaagttattaatttaaacaaaaggtatctatcagaagaagaactttcgttattatttttttcttgtgatgtggtatttttaccttataaggtatgttcaggttctggtgtaatgtttgacggcctgggacatggaaaaccatttgttgcttctgacctaggtttttttaaagaattctcatcaatgaatctgggaattgtaacaaagcgggatcctcgtaaatttgaaaaggcatttgaacaaatggacaaacattacaaacattatgaatcaagtgttaaagagtttaaaaaagacttaatttgggacaatatagcaaatcatcatatatccatatacaaaggcataataaaaaacaaatcattagaattacctaccacagatataattcacatgcctaagagtgtaacaggatgataaagatataccttacaataattcatttctggcagttatataatcaagttgttaaatccaaaactagtagggttctataacactttatgatataacaaattctttgaccaggtatgcaaattagttactaatatttgatagattttgtacatatattagtaacagtctgggcgcgaggggattagtaccgatatcggttctttaaaagagattctatcgtataaaataattagataaatataaagattttttggaatgttatgatttgaaaaagatttgcagaaatataggattattaaggcttatctagcggattaccataccggtcattgtccaaagcgcctttgaaaactttatcataacaggtttctgcatcatttaaagaaaatgttgattgactgttggctatccttgttgtacaattaaagtatcgtgtaagtgcattagcggcatcaacgatagttatctgattgattattactaatgaaaatactataaaggatattttcagtatccctttactagaaattttaatagacaccttatcttattcactcaatattcccgaatagcatattgaacctttcaatatcattatcccctacactttcgcttgattgtacatcagaattatcatttaaagattgtacatcagaattatcatttaaagattgtacatcagaattatcatttgaagattgtacatcagaattatcatttgaagattgtacatcagaattatcatttgaagattgtacatcagaattatcatttgaagattgtacatcagaattaccaaagaacacttcattgtagcatgtcgttacctcattttttgtaggttctttttcaaaataattatcttcttcaacacctttactattatctatcttttcgtcgatacaatcataaaatacaggaagacctttgtctaaagtagcgtttcccgtttgaatcggtatcaaaggtactgcctcaccatatgatatatttacttggataaaactagttgctatcatcagaataacagttacgaaaagtgttggaaagaataatgattttttaaaccaatccttcatgcagttttaagagggagaaaccatttaacttattctacagtttcataaactttttttatacatgacaattacaagatacaatcttagtttataatatgaggttctattaatacgataacgaatttacatattggtttataatatgaattcacctagattcattctatacccttttgtaatgaattgaaactttcttacaatccagccatcgaagatgtaatccccaaatatttttcagtctggacgcttggggattaggtttctggtgttaatagggttctattaattaaaaacctatatctatcacagtttaggaatacttctcaacctcatttatacaatggtggcacgccatatggaaagctgtataattattattagattgatgatatcgtccatttaattagctgattttttgagaattgttacggaatctaaattaatctcctcaggactttcttcttcgtctctttccataaaactagaagtcataatagattatctgcaattttatatatttagcacaaggattcagatagtatccttgaatagaacaaagttggccgaaatagtcatggataataaacacaactattattgaaaaataaatcacaagggatcaacgaagcctgtaactgtaatttgttaaatttatataattttgaagcgaattatattgactatattttagattagtatcattttataaatttatcagtatcacaatatctatatttaacatcgtctccaggtaaacattcagatatatccacaaaccgatagcatttgaagctgaataaaaaatctatttatgactatatttatccactcttccaagaatttctcttgttacttccataaatattttctataggctttatcggctctgttaacttaaagaaaattctatagctaaagatgtcctatctctttttgttatgcatattaaaagaaatagaacaccttcaaagtacattggctatggtttgtacttatactttctaggtttatcttataggaacacatcgaaagcactatctcaatttgtcaagagaagtcatgttgcagtctggaaatggattcaaagatataaacccaagaaaattgctagaaagaggaaaagaatatcagggtttataatcgatgaaactcttattaagattggttcggcccacatgtggatttgggtagctatcgagcttaaaagcagagagattctcgcactaaacatatccaaagaaagaaacatgctcattgctgagcgatttatttcaagtttggtcaagattcatggaaagcatcctatatcaacagatggtggaacctggtatccacaagcctgcaggttcttaaatctcgatcactatgtccactcctctctggagaaaagtctgatagagagaacgatgcagtacataaaggacaggactgaaggatttgacgattattttccttgtagaatgaaaaactgtaaactaaagcatgtacaaaactggttgaatctatttgcatatcaacacaacagggaaatatcactttaagttaacagagccgctttatcattaagcctatattatatcaatatacaaaaaatttaagccttggatgtagattgttttaatccaaatatctccaacaacgcatagtcgtctaactttttcatttctgtgtctgcatttgtataatcattgtcctgattagtccatatccagagcaatcctttagacgtaactgctatacgcaagtttttgtcttttctctttgaagcagtttcattaacaagcttgtttattttatcagtaagttcaataagcgtatcatcatgtgcgtcttcctgcatctctttcttcatccgcggatgcatgaaaaagaaaccttcttctttcatatggggagctacacattcacttccagagctaatacaatgaaaatgatgtccatgtgtttctaaagcgtgagatgtcataccagaccaaatacctccgacatttcatcatcagataattctggtgaatccagagccgttgaaggacccttatgagtccataaaatgacgaatccgtgagaagttttagcaatacgtaaatttctatcacttcttttttgagctgcctcatcaatcaagcggtttacctcattagtaagattgaccaaagattcatcttgaacctcatcttgcatctctgttttcatttgagccttaaaaaatactggctcctctggtaacacatgagaaagacagttactaccaggagcgtcacaatggaaagttccacctggtgttgttagtttatgccatggcatatcttttctcttgatgttatatatttaagtatatacattttaataaatttagtatttatataaaataaattcaattgacagcccaatttaggcaatttattagaatatttggtaatcaaacattattttttgttttttatattacaaataaatcattaatgaaaggtcaaaattgacattctctttggtatcaattagagcaataaactagtctactactttgataataataccattatatttactcggttcgagtctccagagtaactggatatagaataagtagcaaaatcatccaatttaaatccgtctttctttacgtcatcaacagccctccatataacgtctacataatccgagttcaatacaacagcatttggactttcgtataggacttctatgttacttaggcaacctaatggattacattgctgataggtgggtccagacattaatttgatacttggtaacatcttccttcttggtggatggaattttcactttagataacctaatacacctttgtaatttgacagtgtgtaagaatctttaatgacttgtcgcatgcgttaatgccgatttcttgattttctctgtgaagatcgcaggtcttctactaccatttttttcttctttttcttatgccatcacacaagtaaataatatgatatcagatcttgagagttatacaacgtcaagatacaaaattccttcatcggcaaatattatatttaaattcaataaattcaaaagaaaaattgtgttcaaaagaataactgagtacgtagtttgtcctgatcataaggatcgattaggacagtttgggcgcgtgtggattaagttccttgtggtagtagggttctaatacgcttgactgaaaccaaattaaattcagaagttgcttaatgttattctcctcaatgaaattattaatttttgtttataggttaaagaatcagttaacataatttgattccacaatttgtacaaaatttatcattatttggcaattatcgtatattttatatcctgggcaaaattgggttcggagcatcctagatctgtacaaagcagactggatttgaagtgcactggataagtaccatttgcaattggttccgttattatataaaacccatcagccaaaacttgggaattaccaccttgaattacgccaaaaattccgttatcaggaaatgtaacattaaagggatctgtatgagatctagatttaagtaagctttgatagtcgtattctttatcaccgattttaagatacaaactattaacgctatcctgatccttctttgcacttgcatccaattcctgtaatgaagcttttggaaattccttgtcagaccattctacttgcattacgggaataaggaggcccttcccaattgggacttcgcatgtcctttcggatttgccaccattgttaaaagctaagtagaatactgatgaatttgaatttgattgtcccgtagcgcatttatctcccgtagaatcgttaataggattgtccttagctggaagagctaatgaccatttccaaaagtttttgatatgatcattgtaagtttggccatatggtttagccgatgggggaaaaatatttaatgaagttaaaccaaggattggcgataaattagacaagaatattaaaaagacaaacaggaaacatagtgtgggaaaatatgttaaccatttcaacgtagttgcttatttagtgctctaatactagaatgttacgtttattttttagattaactctgcgataagtagtcatagttgaggatggaaaataagaaacgctttaacaataaattttttcttgtaattatcttgcttttaatggttaccgtgataattgataccataattgttaaaattaacgatctaattgataaaaacttcatttccttgcaaagcaaggtgatcttattttctgttaatagctcaatgtgtatgtttttgcaattctttgcattaaggtatgtaagaagttcatttaatacaaggggactaaataatgtcttaaagacaaatgtattttatgtagtttcgatggcatccgtatgcattttaacatctttgataggattactcatatttcaaatgttcattaataattattacgacacatcaataagtatttcaataatagtgatgagttactggacttcagcaactttaatcttatggttatcattcttgtttttttcatggtataaatctactcgtaacttcatagtctttttgtattttgtatcaatgatattgatttcatttaacctaattataacctccacgtacgcaagtgccaaagtgagtgatagaccaaatcatgctggagaatacattggatcatcaggagataattctggtggcagatatccacttttagatagtgtatatagagtttctatttttatgtcgtttttttgtatttggattacaacagcaatacttatgaattattatagagagaaacgagttaacaccattatatatctaattattttagctgtaccatttgtttattttttattaacttatttttatcaatatatcctaagcaacatactgatcttctatcttcaaatcgatcctgtagttgtatcaattatgataggtgcatttctttccattagtaagcctgtcggaggattgatctttgcaattgcattttggaatatagctaaaatcattagatatgaattaagtttaaaaacatatatgattatttctggatggggggtatttctaatatttagtgcaaatcaagcagtagcacaaattgttagcccgtaccctccttttggactcgcaactataacggtattaaatttgggtgcattttttatgatgattgggatttacaattcagcaaaactcgttgctgtaaataataacttacgtaactctatacataaacatgtattagaatcaagactgctaggtacaataggaaaagctgaatgggagaatgaaattcaaaatataacatcaaaaatcaataaggataatagctatcttatggcagaggtcaaacaacccctggaactagaccaaaaggaattacaggaatatctgatctgggtaatcgaggaagcaaagaaagaaaacaaacagtagaaagaaaaaagttcaacataaatatcaaactaaatacggcacagcggtactataaacaagtagcttgttcgtggggatacgattcaagattgaatagagtccattaggaacaaattgatcgagggtccatgacagaacataatctaaatctgagtcaaattactcagaaaggcgtattaatatcatattaaagccaaaaaaattgaattaggaaatgactaactgaaattcataatatttcaacgtcgttgatatgacctttaattttattatgcattgctaaaagggaacgctgaattattgccattagactaaaggatagtatggaccacatacaaaaaggcgttgaataatgatgaaattagttttttaaattcatcataaactacattttgttccaagatattatgcgcactaaaatttctaatatgatcactataaggagatcttttagttcctcattaattttcttgcgctttatctttaatttgtcggacattaattttggaattatactgtctggaattcattggtttatggataatcctttatttcccataaaggattcaagatctgtctgagtattccatttattcaagttgtttatatgtataataaaattatgtattgttagatttgctgtttttaaaataacttctattactaaacacagattgaaaataatatcgactattttcaacttgatgaaagcattatttgcctcaaattttgagatacttttttccaatgatatcaaagaaataagatttgaagtaaaataaattaccagttcaaagaattttttattgctaaggattttttcatccaaattctgcatggtaaaagtttttttatactgcctattatattgatcaataaatcgacttaatctatcccttaatttcttaatgaaaggatacatatggttttctttgttatccgaaagagtaattgtagtataactgggtgcatttaatggatatttgatggatcgatttacctttccaagatctttgtcaagtataaatgcttgatataaataaaaaaaggccatatcaatgttccctaatagtatataagtttcagcaattgaataatagagagcccctttatgaatattcactgattttccctgttgtcgctcttgtctttcccaacgcttagtaattcgcagtaattcataccataacgaaagacctattaggtcctttccatctaataataatttcttccaatatgaataaaacattccataaaattctgatgccgttaaagcagcatagtatttattcttcttttctaagttagcgatcatttcaaagacatgatgacacagagatttcaattcgggaggaaattttaatctggtattctttttgtctggatcaaatatgtttgatttattttcatcgtgtttttcgagatataaatctatttcctcctgcaaagaaaattctttgaaacccattcttttattaatcaatttagtaacagtacttttatgtatctcgaccctaaactgggttgtatcatggataaataagggtttattcataatgtcatatttacatgtgtattcattaatcaatattttctatctgttgaattgtggacattcttaataagatagaatcctacattatctctgaatggcactcagaacggaaaagagtaaaacggcactagtatgtctcttgggaggcgctagggtgattctgtccattctcaatcccgtgataaaaatggagtaatggcgtttggacaaatgtattgtccttaatcagacaattatcaactatgaataataatcttcatatttggatagtatattgacctgttatccgtggggattaagttcccagtggtaatagggttctactactaatgaaagatttcatgtattattcactattgtgataagaagactttgtttgtgtgatatcagtagatctattatcagatcaatgtaacatgtaattcagaattacattcttaatttacacattttgtgttgatacagctaagtatacttttgttcccttatccgtttttatactccaagaaataatactattagtcatgagcatatctaatttaactgacgcaagtattgtttcacatattatctacagggtacccaaaaagaatcatgacgcaatgttgcgaatatgcaaagaggcctatgatatgttcaaacaatacggtattctacactatgacgccttcaagcttagcaactcagacgtaccaatggaagggtttgctaatattgctagtatcgtttctgccaatatagatgaggaagtttggattgagtcgatttattataaagatcgccaacacatgaatgaagtaatggcaaagatggaaaaagacgaaaaagctgaccaaatgatgaaacaatcaatggatctattgcctccgggtgcaaagtttatcgtcggcgattttgaacgtctgagtgtctagatatgaggtagtcgagtagtaactttccttttggaagtcccctagaaattttttctctcactttttattttatttaatgctattttttatctaactaatttatctaccttgtccccattgcactagccttaactattcatatttaaagtaattaatatcattactatgcatagtatcatttagtttgggcgcgtggggattagtgctgatataggtattttaattaggattctacatctcattcagtaaagataaatttaaagattatgccaaagaatttatcctattaatttcgatgctatttcagagacttttgaatttatcacatgcggtgatccaatgaggatacaaaatattacttgacttaatttagaataagtatgattatgattcggattaattaaaatatatcaatctaggtaattttaactactgcattttggtaagaaatccaaatcatcgatatctatatgctcttcagaagaaatagaaaattcagtgtcgagtgtggactcgctaacaacaactcttactctttttccatttttgtttacataagggaagattcttcctgagagaattaaccgagtgataataaagattgaatgaatcccttgatctttaaatcctaattgggttataaatccaccattatctttcataacacaatttacttcatattgctccacactatttcaattacaattgagtaacgaggtgatatttttatattttctattgctgtatcttaatcagtcaattagtcaatgtattgagattaaaattatcatcctgattcgtgggcatacgattcaaggttgaatataatcatacttgttaatcttcttaaatcagatcgacaatgttcaaaccactaacgacctgatacttgtgaattgtttctgtcaattgggccaatacaatttgttagaattgtagtagattaacatgtaatatcagaatcataattaaagttgtatgaattgtaattttgattatcatttaaatattaacaagttttccaaagaataacgattattgatgaaaataaaaataatgaagtttgcctcaagatcataaatttatcttctactaaatgatccttgacctctatttaaccgtcaaattatacattacatttgaaatcctattctcattggaaggctgtccttcaaatccgggtttgaaatatgtttctttgaattctatggtgtggttgccgatgtctaagggtttcacaaataggaaataccctcctgccatggctctccatgtcccagctggaagttcataataattatccttagcgagagtctgattgtatagataagcatctggaagatagagatccctgtcttttgaattcataacttcaattccatcaactttggcagtgaattcaactgaatttaagccgatatttacacaatcctttaactcttgatctgttttgaatccttctgcaaagctacagccaccaccataaatttgaactaacaaagctttttcatgtggaactgtgcattgtcttgtttcaggttcagaggatgagaatagcaagttcctcccatctggaagaaaccagacattattgtcagtttgattccatgcacacttttcgggtgaatacgcctctcgcggatgtatctgactaaaattgtcgggattttgtagatttactttatttggcagattataatgccagttccaccattttgcaatccattctgaaaatgaaagtccataaggttttgagtcctttgaatagattagatctgagctattgacagcattaacattttgagagcaaaccatagcaaaaagtactcctatagagaccacacttatagtgacaaagtgtttaatcacaattgatattgctcacttgtattattattaaggtttatcataatctcaactgatcggttttagaaaggttattttatacgatcttcatttctatcttgtgacacattcaagcaccacatatttgattttcgttgtggggatcatattgcttgttttgtcattcgttgatacaatagtaatgagcctgtacttggactccattgtaaagcgtcaatcatcattcactcaccttgtctttgtatctattgtagttgtcagtattacagctcaatgtttgatactttatataattagaaaaaagaattccgcggaaacaaagccaaagacaagatcctcaatgttatttgaaatttggggaactttatctctttgtgtacttgcctctctatttctatacttgatagcattgctactatatcaaagagcgtatttttcagatattttcaagttagtagtttacctaagttatgctttttctatcatcaacataggactactcgtgatatcccttacctcatggtataaaagaaatcgcggcatggtaatgttgctctatgtattagcactctccgcgttcctgataaacgaaatatccagcattttaatgctaaactctcagctatctggtccttcccaaaaaatttcttttgttactaatccatgggataatagaagcctctctttatcatcatttactgatttttacaagataacttctattctttcgtttactctggcctggcttgcgacttgtttgttactgcaccattattctagaaaactaggccgatggaaattttggttacttgcaacgttaccccttgtgtactatttaggaaatctcgacataattagagcaagtatttttaattacgtactaaactcaaatccacaactactttctaccgttcagttcacactaggaggagccaaacaagcgggaggttttttctttgccatctcctttgtaatgatatctaaaaatgtcgataatcaaaagctaaagttatatttgttgatttcagggacaggcataatgctactatttagtagtaaccagatttcgcttgtgcaattaattccatatcctcctttcggtcttaccactatatcactgatatctttttcatcatttttgttattgataggattacacagtctcgctcactcaatggcacatgataaacagttattggaatttgttagaaaattagtcaaccaaaaggcatcaaaattccttcttgacattggatctgcacaatggcaaaaagaaattgacagaacagtatctatgattttgaattcaaattctagccttatcaaagagagtagctctccaacctccttaaccgagcaggaaattaaagactacatctatgagatttcaaaggagatagaaaaaatgaaggaggaaggataagctatgtccaacatgcgacaaggtactgaatgaacgaaagttcatgttgacaattgtattcctaaaaagttagttagaagttcatagataaagatcgtatcacaattacttgattattcaagtaatgtccttctcaaagaaataagacactcatacattaatgcaacttgatccccagtaaacattagcttgaaatcatcatcccagtagtccatatggttcataactaaagggtatacatcacttccaccgcacttgtgtttttcagaatatcccattaggcgtccttcttgtggacctctttgtggaggagtgtcgtctaaactatcatcattattacaaatagaggaatcatctggaccccaaatgtgatataaacctagccagtgccctatttcatgagtcagagttctacccttatcgaaaggaggttgagcagttccacttaaaccgacgcgatggtagtctatgactactccatctgttgctttcacatctccgacaggatccctgcgaggatattgcgcataaccaccggcaccgtccaggttacaaacccatatgtttaaatatttagctgtatcccatgcatctttaccaccctcacatgtggatttaactggttgttgttttagtggcaaatttcctgactctttaccgacaggaggagctttaaaggatattttatcagttggggttctggtaattccattagtgatgttaccgtaatcgtccttatccgccagtataaactctatatgtgaatctgcagcaagttttttttctcgaaagtatgtagaaaaaagaacattatctatatttttgttccgaaagtcctggttcagtacttgaagctgttcatgtatttgtttttcgtcaatgttttcaatttcttcatgatgtattatgtggaaaaccacgtgaatacgatagatccgatcgtcaacagaatattcagaattattaattaattgttcatattgttcttttattaacaacacattgttttcattttgactgaaaattagagagttgtaatattcagtcccacatccaaattccttatccatacctaatcaataggaggattaatgtactccaccatcaagtccgtttacggtactataaagagtatatactcttccgggtatgtcaggcggagaaatcatttccaaatgttttacacgaggacaattctcgattgtatcacagtctctaaattgtcctgaaagatctgaagccgccaccaatttcgctaaactaaacctacgatccttttccaaaacatatgcaattgccatagtttcaggtgttcctctagcatcccattgatacaagtccaaatattcattcagggaatattcaacaataggcttcaagtcatcctgatgatttaaaatataatcagataacttaccatcagtaggctccaatgcgttaaaatctacttctataaaatatagaccacttttagcctgtctattttctgcataattgtcttgtttcggaattgattccctttcgattataataatgtcagtattaagtgctcgaatgtatttggttttcttaatttgaaatttatcgccccaaattcgtaccatattgttcactattgggtgatattaaaatacttttccaattttgagcttttttgaaattcttcatactcagtataaaatatccaaatagataagatttacgatattttcgaaatatatgcaagataacccaatacttatcttaattcacaatctactatcatattctcaggaattcttatcttaatccaattcaaagaatctagagcctaaagcatcaggattatgagactataggtttaggtaccatagaagacctagtgcttggcattactatcgaattgatagtgtaggtataaaattggtattagacatcaatataataaaggtatcattctttgaaaaattgaagattgtgactacataaattcaatataactttttaaaagtttattagataaattgttttgaaaaagcctatgagtgcaaataaaaaccaaaactctaataaaacgaaacctcaaattcaactttcctttatgtcatctccaagagctcaagcaagtatacacaattttggtgtacgtgataacatgggtgagcttgtagccaacttaagtgacttaaaggattggtttgaaggatacaaagttgatagcattgagctatatgtcgaaggggccgtaacaagtggtgcaatcaccaaactattagtttcattcgaaggaaaaggtggatgcaaaataacattaaaaccacaataaataattacggatattgggtatagcccagtcacctgctgatacggtttaaggctgtatagaatatagaattaatttaagaaggtgcccagatatagattcgaattccggcaatcatgatatcattaccagtcaaagtatcatttagtttgggcgcgtggggattagtgccgatattggttctctaaaagaggttctatttctttagaaggtattgttaaatttaagggttttgatataccatgggtattgaataggatgcaacaaagattaatattttaacttcatacatgaaggctactttgaaagattttatgtatttgtccaaagttaatcatcttctcactacgtttgcggtaaagcgcgtgtcaaaggaacatttgatgactaaaatttgataattttggctatggcataatcttgtctttgttctccttccatctcatcatttagaatcagggcggcattaggaggatctacggcaaagttgtttggcacccaacttcagttgccgataaaatcggttgtgttaacagatcctactattctgtctattctgtcaggtctatctgaaaataagcaattaaagatattccttacgttccctagcaactggggttaggtccaatacaacaaggttggcatactccagtttcatttgctgaaggtagactttctgtttcggtcattgatgttgagtttccgccgccggtcatattgcccattgatgtcatgttgtcatccatgttcatggtcatattatcccccattggagttacatttggaatatttggaaaagtcgcaaatgctgctatcggtgatgtcattcccacaacaaaggaaacagctgctatgatacttgcgactgcgattaagtttaactttttcatgaatctatagtagtgttttactaccatataacacattttgatatttatgtaagaatttgacaaaattgtttgcatagttaataagactgcatgaatcttttagctttgagtatttttcataaattagttatgaattttttttaatgatagattcagtggatttaatgataatccaatcagcgctcgaagaaattgataatattttcatgtttgtgtagttgatatggaccgagtgggatatgcggcaataattggtatggaacccccaacaaaagatgaaggtagcaatagcatgggtaaatctactctattctactttgtcctattccccttctgtcttacctatggccccaaatggattggctgcgatattcagtctttctccaaatgtttgtccattgtctgttgataccttggcaacaggaagaaatgatgtcttatttctttcccaccagggcacaattatgtttccgccttctgcagatatttccgcgtttactgaatcagagttatctgtattgcttacattggttatatcaagacctttttattagattttcaatattacttgaatttttattatttgttaaattcattatttaatatttaaaatgctttaatatagcgtcagtaggaggtatttaatgaataataaaattattgccacaatcgtaattattgcaatgcttgctggctttgcgtctattgtcgctcaaatatcccaacaggcctctgctacagctactttttgccctcccaaaggtgagaaatttaaaggtgcgcaagtatgtaacgaagaaggaggctgcaagaaaatattcacaccaagtggccgagaaaacacaaacagtaaatgctaagtgctcaattaaatgcaaacacagtataatgatcagtcattatattaacaaccactttttattgttttaagtgatatattgtattggaatggattaattgattgttttgcctggtattcctaacttttgtgttattgtcatgtaagattatgattctgttctttaatgttttgaataattcagttaattgtattgctaagtctattcattagctactatactctccaatagatctggatttattgaaaaagatacaacccttttagaaataaataattatatagtactacatttagtaaatcatttcactaaatgccatgaatattttgctgctcttatgtgccattcccctttgacccgtaattctaggtttatagttttccggtatcatatatcttatttccagtgccacataagaaatgcccccgttatcaaatagaaaattttattttttatttaatctatttgtgaaagaaaattaccatatcaaatatcatttagtttgggcgcgtggggattcgtgctgatatcggtcctataatgtagattctattatttcattgaaactgttaaatttaaagattacgatgattgaattaaagatcaaatttaccgaactaaattatgagatagactaatttatggttatactggaccgcaacatttgtgggtaccttattagttgcatcaatatatagaaaaaaggttttgaatgaataacaaatattgttctactattggcaacatctagaatccgatctcctccgattcaacgtgttccttcatatagataatatttgaagtacatacaataagatgactattaaatattagagtttgttaagatgattctgcaatattttatagtaacttttttccaaaaaggtagagatattgataataaaaattacaacaaaaaatatcagatgaagatgactttaagccttgatgtaaaaatgtgggctaaaaacaataaggatgggaaaggttcgacattttcctttaatcttccattactcataaaaaaatatacattaaaaaaatgttctatatcttctagtatagttatacataatcaataactttgaaattactactagtaaattggtgtaccgaagtcacaatatacaagcatttccagtatttagcttttttgtgtttttgttaatttcatcctctttttgctcaacaattcaactctcttatggtgcctacgccaaagctcctcggtcaccatatggacctacagtgaatgacgatactctcacagttgaaaaagttacagataatttggatattcctacgagcatggcatttctaggtcctaatgacatcctggttacagaaaaaactacaggtaaggtaatgaggatcttggatggactggtgatgccgcagccagttttggatgtcccagtagcatcactaattgagcgaggattactcgggatagctgtttccaagaatatagcagaaggaaaaacatatgttttcctctattataccgaatctggagatggaatagatgaaagtgacgcaaataatcttgtcgatccattgggaaataggctttatcgttacgaatttgttgatggcagattaataaatccagttttgttattggacttgaccgcaattcctccaaacgctaggggtgaacataatggaggcaaaatccgaattggtccagatgataatgtatacttgatagttggagaagtgggtggtcacagaactcaggcacaaaatgtgttcgatggtccagctccaaatggacttggaggcgtacttagaattagtcaagatggtggaatagtagatccagataatcctatttttggtgatggattacctctaaatgtttactatgcaatgggcattcgaaatagttttggtatggattttgatcctctaacaggcaatctttgggatactgaaaacggacctgacaccggtgatgaaataaatttagtatttccgggatttaacagcggctgggttcaaattcaaggttatgaagatgatgatttactcgagaatgatgcatctgaagctaatttgacagagtttggaaatagtgaatatgcagatccaaagtttgtttgggatacgacgataggcataactgcactaaagttcctgaattcagacaaactgggtaaagaatatcaaaacaatatgttcgtcggagacattaataatggtctcctataccgatttacttttaatgaagatcgagataatattttcatcaatgatacttttgttggtgatatcgattcattagatgataatgaaataaatgaccctaaagagaatcagccaataatctttggacagggttttggaggaataactgatattcaggtcggtccagatggctacctatacgtttcaagttattcaggctctttatataaaatactaccagtatctgacagtactactccaaagaatcaacctaacttgaccccacaaaacactaccttgacaaatcaatccgtttctgcagtcattttgggaatagacggtgataattcctattcaccagaacctatcgagattgaatctggacaaacagtaacgtggattaatggagataccatatctcatacggtaacctctggacaagatggtgacttggatgagggcactctatttgattctgatgctataattccaaatcagtcatatagtctgacatttgatagtcctggagaattcgactattattgtatatatcaccccactatggttggcgaagtaatagtgaatggaccagatgcatctacatctacatcagaagattctccagatgaagagtcagatgaagaagatgaatagatgaggattttaggaatgaaaataaagacagatatagactgctaattgagaattttgataaaccatggatctatttaactttctaggagactatttatactctgccttacgtctacatgtaaatcttttttatcgaatgagaatattagctcattagttagaatttataagaggatgaaaacatatcttgtcctattgttcatcgtatttaactatcttccaatggattagcttaaacaccgataatatacatactagtttgatggaaaaaaatagtatcatattaataaataactttatggttgaagacactaataatcagcaaaaagtagctgacatgcttgaggatgcttctaaacaaatactaagtaaacatgatggtttcatttcaatacgaattcacaaaagtttggacggaaaaagggtaatgagttatgtacaatgggaaaataaagatgcaattgaaaaaatgcttaacgatccaagagcaataatacaaatgaatgatattgcacgtgttgctaaggtcgagagaacattgtatgaactggtatttaccgaagagaaaatatagagtagaaaacctcaatgattccgtattaggtaataatcagataataattaaatatcggtaattattgaagatagatgtaagttacaagttgaataactggtaaaatgaatggattattttgtttgcttttattctcctatttcattaagtacttaattacgtctattataatctttatagttaatattaatagatctcagctcagttacgaatgtaattttatctatagatattcaaccagaagaagttgggactcgaatccatacgtataatcgcggagtcatcaaataaacattttaacctcattctaggcgccggaggggagactcgaatctacacctttccgacgtgggttctatcgaaagacaattgcatattcataaattgagtgtttttcaaaaagctcgttctccttatagtcggacccatggggtattaagttccctttggtaatgggttccaagaatagggtcattaggtaactaataaaaaaactcagttggtttgccgggtcggatgtcggacatatttgcctgtaatcaacaactcaatattatttctaatttttttatacactctggttcgaacccgtagggattaagttcccagtggtaatagggttctatcgccccgaaaatcgattttaaagtcatagaaataggtggatttttactatcttttgcagataaacaatttgaacttattcagccgttaattcttgaacagatttttaaattcaccattaataaaaccagtaccaggagttaataatttcataagctcttcgtagatatctaagcattctttatcctttgatattttttctacaacatcaagacggtgttgttggtctttgtatgttaccatattaatccatatttcttcatcgtcaggattgatgggaattattttggatacattgacgaatccaggtatattttcagcacttataagactaaagcaatcataggttacctcctcctctttctgaataaaatctttcaagcgggttgtaactcccaacaaagattcatggttattcttgggaactcgataaaagacaaattctgtgtatcctttaatattaacagcatgtgtggtatgatccaagttactcatattattgactttttctgaaattgatttataataaaccttagggaacaaagttacttctgtaagtcagactttcttaatacgggaagcaatttattcaaagtaattgatctacatcaatacttgagatatgatatcgagtaacagtttgggcccatggggattaagttccctgtggtaatggggttctataataatttgaggtatcagtttttagatgacaacttggacttaaacctgatttgtatgcttaatatgctttctcatccgtgaccatgcttgtctagttttataatccataggccgaatatctgattctttaagtttcccatattgatcaaattctcgagcaaatgctgattgtattctatttagaacttcttgtctatcagtttctacaatcacagattcagtagtatttatcccaaaatcatcaagaatctcttcagtagggattttgagtattcccaaatgtatgtctatagaaatgggattaaattcataaccatctatggggtcaggttgaaataagaatcgcggcatagaaaaaggtataactatactagaatttaataattacaacatactaaagatgagctgaaataatatatatcatagacgtagaacagcatccgtggggatacgattcaaggttgaatacaaccctaatattaaaaaagataagataatcaatatatttatgtcatcgtatttttgaaggtattaaaatcaaaatgtttgtgatataaagccaacaaatgaggacagtattttggaattgctaacaaattctaaaactcgtgttataacattattacgtaataaactttagtattaatagtttatgaaaatgtacctgctatattgatttcaaataattagatctttgtttgttaccaattccctaaatgatttatatatcattatgtgtattactatattaggagagtgttacaaatgaataataataaaatactaccatattatcggtttagcaattgttttgatctggttccaagtaaagagctctatgatagatacgaagcattcagagactttgatgatagttatagaggaatagataataagatcagtgtgttaaatcacaattcagtgaatgtaccaaacgagacagtaggagtaagagaatatgaaacacaagaagtgtcaatgtactggaataaaaaaataaaagacgcatcaataaactgaaaacctgtgttgatgtaagcgctaatccaatttactaaactcctttgtagaaaagcaggatgcagatgaaggtatattacagaaaccatcatcagtaaatgaaataaatcagtctgcaactgtagaataggaacccacacaatcttgcctaggaggccaggggtctataacatccaatatcacagtaaattctttgatttgagtacctatattagtgcctaatatgtaatggatttagtatagcattttagtaacagtttgggcgcgtggggattaagttccctatggtagtgaggttctaatactaaatagcaatagtagagttggtagaagataaagtattaccatacgaattagtagaatagagtccaaactggttcatttaagtaaacagttcccagaggtttttcatttttaaaatgatcattatctcaaactagaaatgaggtagaaaaagatgtttgaaaatccatattcttcctgttcctcatttccagggatttatgtcgctgactttggaaaggtagatttggtaaaaagatgtacataaatagtatttaatcttgatagaaaaaagaaggaattagctcatctcaatgatacttactgattatttgtaaataatactccctcatcgagattgataaatggttcttcaggatgactaccttttttgttcgtgaattgttggcaactttccgcggtattaaatccggcctcttggggcgagaatggagtaaacacagcacatacggaatacggagcgccatccttaaaaagacctcgtggagtttctatttgttgtaacacataagtatcaatattatcatttacactagcttgcatattttgaaaagacgaatctcccgttggaacaatgcaaaatgcttgaggatcattaactgaatcaagtgtgactgttccttcatatacacaataactaaaagttccttctaaattctcactccattgaaccgtaggtgtaatctctaatccaccccctgactgtgacagggcaggactaactggaagattgtacaaatacaatatagatgctatagatagaacacataccaataaggaaatatttttcatcaatatgatgtaataaacaaaatatttaactaagcattctagtaataacacttcttgatcatggtgaaagttagtttgggcgcgtggggattcgtaacaaatttgactataactgtgggttcagtataagattttgtatgaataacttgcgcttgccattgccattctatcattcattatttacattaggacctgaagtcaaagactgaataagtcgatcatgtattctactaaaagaacatacttattataactggatagatcgtcagcatggaaaatgatcccaataaaattaccattatttttgtccgtccagcattacaacttgtaaagttttggtagcagacaatttgtaaccgaatgatgtttcaagattagtgatagtatttgaactcgcgatattataattagattcaaaaattctggttctaataacgctaacagagtaaagttgtattaaaaactatattttttatggtgatggtgacaagaccttaccaccatctaacgtactaagcccatcaccttttgttggaatacgtggactagtgttctcctcgctgttagaatcatcttccacttctgctccagaagtgggaggtatgctaggaactgtattatcattgtttgaatcatcttctactccagaagtgggcggtatggtagtatcttgattgtttgaatcttcccttacttcctctcttggtgtgcaattgcttggaggattagtatcagcgcagacggtacagtatttcttatccccaaaaatatcacaacatttgacggtatacccatcagttactggaacgcaccagtaggacgattttactggttttgacattacgctggatgaaagtgatccggcaatacatatcgaaattaataatgttataccaataatgattaatatattattcacagtcacttttcctttaagaaatttataagtatttcctagtaaataaagaaaaattacaaaaatgtatagatttagtctgagtgagtggagatacgattcaaggttgaatataatttcagtctggagtattcaattcatgggaacaagtatgaaccgctttatttaaggcaatttgctttaacatttgaacaaaatccattttattatcaaaggcagtctacttaatacaaacaaaaaagaagcgtaaagaatgatttcagggagtggctatatgtttcttagttaaagaaattaatgtttgcttcaacaaaattattgtcggcaaactcaattggttcatcttcaccatcgttccataatactattccatttacattattcagagtttttgtttcaccagtatctaaatcaggtccttcttggttatcagtaattgtggcttcgtataaaatatttgaattagactctgattgttcgacttgattcatttccacttcaactgcatcagataaaccatcattcaagttggctgcaactagtcttatgtcatcattttgaataagattcaactccaaagttgcagaatctaaatcacagttatcaaagaaggcaataactcttacatcttgtggatctatttgttcagatgatagatctacagtatcagaaatatcggcacatgagtttgacggagtaataatgtatttgttattatcgtcatcattattattaccattgtcgttatcattgtcatcattattgttgtttccattattattgccgtttccccctttaccattgttttcacaaccaataccgtcgttatctttgtcaagtctgttaggatcggatgaggtcactttgacgctatttggtatatcatcgcaattaagaatgtcagaacctgagccgtttccccctttaccattgttttcacaaccaataccgtcgttatctttgtcaagtctgttaggatcggatgaggtcactttgacgctatttggtatatcatcgcaattaagaatgtcagaacctgagtcggattcatttgactcatcttcttcacagcctatcccattaccatctctatcaaagtcctgcgtatctggaggatttactttaaagttgtggtccgaaatctcattaggttcaatctttccatcatgatcacaattgaggccacgttgattaggtgaaatacagaaatcaggataagaaggatcacaagaagtttctgcacatccatctagttcagggctgtcttcacagatattttctttagatccacaggtttttccatcagatctaaatatcattccctctggacatccatctgaatctggaatacatcttccagtttcatcatcatctaccgtatggtatccgtccggacatccgccttcaggaacacattgatcatcatcattattgaaaaatccatcaggacaatctccttcaacagaagcacatcttggtaaatcaggattcaacaaacaatcgttgtctggaccttcactagtaatactgattggagaaaagcccgtatttccatcgttcttaccctcatcgctgctttcacaacctacaccatcattatcaccatcaaacccgtttggatcatctgatcctactttgaaattcttatttgaaatatctccacaatctagatctcgtttctcagtctcttcgactagaggaggagatgcattttctgagctaaaggttaatcctaaaagactctgtcctaaggcggggtctgtagtagtagttgatgatgctaaggcggggtctgtagtagtagttgatgatgctaaggcggggtctgtagtagtagttgatgatgctaaggcggggtctgtagtagtagttgatgaactcgattgatctccaccaccggaatctccaccaccggaatctccaccaccggaatctccaccaccggaatctccaccaccggaatctccaccaccggaatctccaccaccggaatctccaccaccggaatctccaccaccggaatctccaccaccggaatctccaccaccggaatctccaccaccggaatctccaccaccggaatctccaccaccggaatctccaccaccggaatctccaccaccggaatctccaccaccggaatctccaccaccggaatctccaccaccggaatctccaccaccggaatctccaccaccggaatctccaccaccggaatctccaccaccggaatctccaccaccggaatctccaccaccgtcaccctcagtggtggcatatgcaagtaggtttactgatgcattaggagaagaaaaaaggatagtggatgaaactggagcagtgaccatcggaactgatattgcaagtattaacaataatactggtatttgataaaatatttttttctaacactgttattacgcattgaaaggttataattgatggtgtaattccaattaatatccattttataattttcttatagataaatcgtatataacattaaattgtatcatatccccaacaagaaacaattgatttgaatgatcagggatttgacatatattgacaatagtaatgcagccaccactacaaattcttatatattgtacacttaaatacatgatagttgaattcagcctgttttagaaccgggtttctcattgtattttttgtaatcttttctctactactatatctaaccttaccaatgtcatcatcgtcctctctaaatactgtctcggcttctccttttagtagttcgacagataacaacatcgtcaatagcagtaacttagcattacctttaggtaataatcctaattcgggtatacaagataccaccaccaataacaagaatggtcaatctggtttcgacattcaacaaggattgcctctttctaagacaatcggaatatatgatctacctaagaatattatattaacggatgattttggcaaaaataataaaattccaataagagcatttttttctgaaggtttgattacacaattagaaaagccaagtgtaaacaagcaagtaaaattcaaacttgatgactggaatcaaaacatgattcttggctttcaggattcgagtactttgaattttgtaaacataaaaaatatcctggtaggacaaatcaagtcttatgattctgtagaggatgctttagaagatgctacctattgggagaatgttccacttaacgatgaaataatgttacgatttgaaaataaagggttaaactttatcataatggaagtgacctttcaaaacggagtttctggagtttaccatgcaatttttaacctcgatacttacggaagtgaatctggtgctgatgatcttttagattatagaatggataaagaggatgctaattacaacattgttgatgattcaaaaccagaaattgaagttaacagtccattttggcaaataagtcaaataattgtttgcgaagatctgaaatataatgggtttagagtatgtggttgatgttaccacaccttgtcgaattcttttgtattagcaaatagttagtccctagctaatcatcattgtcaccaccatcatcatcattatcatcgtcatcggtatcttcattttcatcattgttgttgttgttgttatcatcattatctttatcattttcattattactatcgattatagaaatagtatccaggtcttcagttccagacggattttgaactccttcctcgcaaattttgaatccatacaaagacaaatgagaacatatcaaagtagatgatttctgataaaatacaggagtatttaggatatcttctacatttaatgaatcaatgacattgtagttcgcgccattatcttgttcgcgttcaaattcagaatcagaagatgatttagttctctgatctgattcaacgtttacaacagaagaatatatcccgctggtgccatttgaaaattgaactgatgcgaccaagtaatgcaatcctgcattatcaagccgaagtaccacttcatcgttaagtggaatatctttccaatattgagagccttctagtatatctgacaaagaatcatatgtctttatttgacccataatcaaatcatttacttttacaattccaatatttggtctttcaacaaagtgaaaggttaacactggattataaccaaaaacacttccttctggaacaccagatgtatttgtttctgttgtaattccactattatcagtaacaaatcttagcggaagacgagcattattgtcagtattgtcagttaataccaggttctcaggaagcaaatttccaatcgtagttgtagcggtagtagaagaggtggctgggctagtaaagtttgaaatatctccagagtttgataactgagtttgattggcagtagtagttattgcagaagataatggattcaagttattttttggttgactaattatctcgtaggaacctatcattttttgagcaactggcatatactctgaaaaccattttggatctgcaacatagttgatacggtaaacaactccatcactgatggtaaaaatcctcattacgtcagaaatgcgatttaaaatatccatttccttagaaaaaatgattttagcaggttttccagccaaagttccatcggttatattgttgatttgaaattctgtgttaatagtagaaagcctattcaaatatttatttgtaaaatcattgagatttagatttgaggatgagatattttctacagccaggataacatgagctggattatagatatttatcagagtagctgattttttttctcttatctcgggtgctgaaaaagtgacaattgagttctggtcaaggctttctgtattcttccaattatagggatactgtattttaattccgtaatcagtattctcataaggaataaaattttcattcatattttctgttggttgggaaaataccgaactaacattataagaactaaaaagcaaagtaacaaaaatggagacaacaccgaaggtgattgataagaaaggttttgatttacgctgctccagaataaacaacagttggtttgatcagcattcattcttaaatcttttgtcattaggaaaatatcaacacatcgaaagttaaatcattgctcatatcgaccagttcgcgacttggatggatcatctgaaaaatatatatattgtttttgacactgcttttagcagataatgtttgctaatttcctaataagagaatttaccaataaggattctaatagtgtctcttttctgattttaaatattgttgataaagggtttaacattaaagttgatttaaacggtttagattcggatttagttcatttgggagaatattacaatcaacagaatggtggttgtctctatgtagcagaaattgaagatagcaataagataatcggtacagcagcaataagaaacctcaagcaatttcattcggcttgtgaattaaaaggatgtttgtatcaaaagagtatagaaaattgggaatagggcagaggttgttagataagactttagactttgcaaggaaggctggctattctaaaattcttttatacagctcaagtgatttgaaagcggccagaaatttataccttaagaatggctttgtagacataaaacgctacaatgacgattatagagctgatgtgtttatgcaaagacaattgtctcgtgtttaaaagacgcaaccgcatccagtttcgacgtacggaggtacataatctccgatgccttacaaatttctaaaactaaaacaccatatccattcctcatttgagaaaagactgatagaaaagaagatacaatatatcaaagatacaacagagagtttcgacgacatgaaaaataagcatatgagttgaaagaagtttcaattgtgaagatcgtttcatatgttttggcgccggttgtctcaaaacaattacttgttgcgatgtcgattaaatatgatgttttatattatcatacatgtcagaagctaacgaatttaaagaaaatgaaaatgaggcaactacaacaggtttagacaaatacaaaaaagaacacgaagtaaaagaagacgagccagatgccattgctagtgctgactaagtcaataccctgccctttcacagttggatgactttatagggattgacactttatggatattatattctattataacaatcgacaatatacataagataaaaggtgccctaagcaagtttgctaactgcgcatctttattatcactatttaagaactttatatttactcctaagatacattgccgtagcttttgagtggaggcacacgattaataaataaaaatgataataaattataaaagaatcagaaaagccttcaggtttttgtaactaattgtatatattgttgaaccatacaacagcttttggtacaatatattattgataaaatttgaatatttcatataaaaattaagcaataaaacccattcatcttaatctttataaaaaatcaaacccagtccaaaccatgataatccatggggccatgacagacctgacaggcgaggagctggtgacagaggagacaatcagggggttcaacgagatggcgggcaaaaaaatttcaatggcctatttttccaaccactggttcaatggcataaaatttccaagggcaatggccacagcggccaggaaccaaaggacaatgccgtggataagaatgtgcccttgggtcgattgggagagacagggcaagtacaatcttttctcaataatagacggcgcattcgacaacgagctgagacagtggggtgtggatgcccgtgcttttggctcaaaaatggtagttgagtttggtgttgagcagaacggaaactggtttccgtggtcacgaaacatttccccagacaagttcaagagcgcttaccgtcatataataaatacagttaataccccgaatattgagtgggccatacaccttgatgttgagggtgacaagcccttcaaggactatgacatggccgaggcgtcctggtttggagtgtcagcctatggtgaggaatcacaaagaggcgcaatgaaggccttaacttcaaaatacaacgagctagttgcactgggagatggaaccaagaaatacgcggtgctggaatggtcactagggaaggaatgggatacaaggtcgtttttgcaatcactgatagataacaactttccaaagataagccttgtttctgtatggaacgaaaggacgcagggcgagattgacaggaggattaactctactttcacaaacctggctgcgtacagaaacctcatcgccaactctatctttgtctgattttcaaactcaataccatctctatgtaattgcaaagtttattgatgatacaatatgtctaaaaatgtaaagaatgatggaatttgtcaatatacttctaatatgtgctttatcattctcaggaacttcgtccttttatatcatattcggataatatttgtctcgataatactcttgaaaatgttttaataatccgtcccttgtcagttgctttccaaacgaagttttaccttctgacacaaagagcctatcccatgaatttttagagaagggacgatttaaaatccattctttgacataaggttatgaatgaatcaaggaacagttctttgctcagttttgccgttaattgttatttcagtaaaatgttttaaaccatcataggtttttttgaactttatatcaccgattttcaaatttactagttcggatggactacagaaggtatcgatggccatagaaaggaacgccctatctcgcttcgaaggacaatattttagaaagacttcacattctcttgacgtccaaagatccgaagatttgtatcttgaaacctcttttctcgatagtctcataattctgttcatacattaaggcgtttttctgtttttgacgtctggattatttttataatgtaaccatctaaagaatttgagtaaaatgaaatgtctattattccatgtacctatcaaactatggtttggatcaatttcttcagattttctaaatttatttagataagataaaatatcttgctttgtaatattcttcagattggtaaagcctaaaattttataaaattcaaaagtactttgtttttaccttcttttgttgattccttaatatttatttcattttgttgtacaataatataatcacaaattgtctctgtgctttgaaatgagttatccaaaagtttgtataaagattttttaatatagggttcttgatatttgcaaatagagtttatagattcctctagtgccttctcctttgattcggagagagtatggtctggttgaactaggttttgcaaattgtcaatattattctgccgcttttggttaataaaatgttcatatgaatccgcgactaaggcgcggggagtgggattcgaatctacgtctttcacacggggattccaaccaattaaagcaatcatggtaatcttgtatatgcttgttttataccaggttcgggcccgtggggattcgaaccccagacagccggatttctttctattagcagttaaaagtccggtactctacctggctgagctacgggcccattacctttctatataaaactagtataatttaattttatagattaatgagaggtagaccgacctcaagccaaattactcctataaaccaagcgcgaaaagatgaaaaacagtcagaaaaggtacaattatctaaaaaaataatcgataaatatttttgagaattatactatccaataaaagcagtaacatgtatccaaactatgatataattaatttcgattatacattctgattataatgagtaacataacaaaaacccacaaagttggactttttgcaatgtttattgcagcagccttaattggttctgtagtagcctttggtgataacatggcatatgcaggtggaaagaacaagaaatcgaacgatgcagaacaagaaatcgaacaaggacaagaaaataaacaatcaggacaatgtgttactggaacaatatcattgattaactgcaacaacgtaggattacaactccaaggtaacgacggcaaattggctttaggccaacaataaactctttttttgtctaaattttaatatattttgtaattttacagtattttatccaaatagtttatctatattcggatccttttgaaataatttcttgcatgttttgtcataaaaattctaaaacagtctcgttcttacaatttctttataaaaattttaaaattaatcaaaaaaattcacaataacttaaaacagatgaggaacaccactcattgaacaggcacatatcatccgatcaataaataattgaatctccggcttgtttcaatcataattcggtgagtagtatattgttattacggtacctttaatttatgcaagaaccaaaaaataaaaataaaaataaaaagatataaacttctgataaataaatacgctacaatattttatataaaaatgatagtaacatgtatccaaactatgatataattaatttcgattatacattctgattataatgagtaacataacaaaaacccacaaagttggactttttgcaatgtttattgcagcagccttaattggttctgtagtagcctttggcgacaacatggcatttgcaaccaaaaaacacaatgactcagaacaagaaatcgaacaagaccaagaaaataaacagaatggacaatgtgtatctggagatttcacattagctggatgtaacaacgtaggtttaatgttccaattccaagacggtaacatagccgcagcacaacaataaactctttttttctttttgtaatatcaaaatcgatattttaccttatactaatagaaaaaattaattattagtttttagcctgtcaaataatagttctccaagtaaccattttagtgaaacaatattatgatttgccattttattatctcgtatttgtaaaacaaatctatcgtgatccttattctcaagatcctcaaattctttggatttagcatggaatttttcttcacggtaaaatgcagttgatcccgcactatcaataaacataacaaaagagacattaacgttgtatttttcaataatacaaatattgtgttttttatcgccaagcatatttttttgcgaattattcttgtactcaaatttcaagatattcatataatattctaagagtgggatcattttccgtataaaatttttaaaaacgcttgattcacttggacaaataccatagtcgttgacagaccacttaaaaaaatatgaacccattcgtatagtaggttttaaagaatagtcatgattaacctcatttgtcaactacgaaagcatctccgcaaatagtcaaaatgaaatgaatatgtgtatggttaatcactataaagtgtgttatatcgctatcttgtaataatagcttccgaaaaccatttgggaatcatttctttcccgttttttaataaaaacgaaacactgctatcaagaatatacgtattagcataatcatcagcatttctgacacttctcccatatgcttgtataagtcgaagtattgtattccattcataccactttggattacgctgttttagtactgatattttcttgtcagttaaatcaggatacggaacttttactattacttggaatctagaaagatcgtccttaaggtccactcctaaaaacatggatggagatataaggacagtgggttttgtactttgagtgtgttttaatatcatttcatttctatcaaactttggattggtttcaatgagtcttgataaattttccttggacaagttattcttgataaactgaacttgtgaatacgacgttgtatgaattatgcccttgtcattcttatgtactgaaagaaggttatcaagtactttgactatatttggtaaagactcgctcatggtccttgcatttagccaggctacattcatcagatatattggtctatttttgattgggaaatctgaattttcaactcgtataaactttacatcttcgttctttaatcccaccgccttacacagattttctttacttagaatagtagcgctcatcaataatgaaatagaccctttatcaaaaatatctgtaaaataacttgatacaaccagcggttctaatttaattcttgaaggtttattgtctatttcatttttagtaatgtttgtaactaaccaattttctttgttaatacgtaaatcctctaaaaatgtaaacaaatttttttcataattgatggcatcaataagatttttttcgctaacatgtatatcctcgctgttgccaccggatcccaaaatatttgcggatttctcaacataactagtaaattgctcttttaatcctgcacaaaaatctatccatgtttcgacatcggtctgcttattatcaggtaaatttatttttggaaagaacctgattaaagattctttactaaatatgatatttttgaacgaagatacttcagattctaacgtatgagcttcatctaagatcaagagctttcttttgtttacaccggatgaataaaagagatcagatagaaaatatttgtaattatagatggtatggctagattttatagaaatccatttttggtgataataatgacaaggctgccactcgattttaacaagctgggaatgttcttttgctttgtcataatatttttttaacgcgtatttgtttatatctacgttttcataaatggtaccttcagattttacatcataatcactcattctagtcttataaatacaatcaaaatcatcgtccttcaggcaaggtccatattcacaactttctcttatgcccatatcctctttaacgatgcagggaaaattatttcgacctttaacttcagaaagatatggaaaatctctattatactgagtttgaagatcctttgttgatgtgcagatatgagaactccccagaaatcgtgctagcgttactgctaccgcactttttccaaatcccgttggtgcttctaaaaatatgaatttgtaatcagatttgagtgcttgatcaagttcatcaagtactttatcctggttaggacgtacataatccagagggaaaaaacttcgaatagacataagaggggatgattatctgtagacaaatggattattaaagcgtaacctaataatcatgcaaaaaatgattcaatttgtttgggcagaacagacaagtaatagctataattcactccataattccatggcccataatccgcatactctttgaatccggtttaaataaaatacacaaatcgttctctacaaatgccagtggtttttcaaatgaaatcaataaaattgaatcgggcattacttttattttcactgtccgtatctgaagccctacactcatcatataattctgtgtttcagatatttcttctttaaagtatggattcttgatgaaatttagttgaaagtcagttgctgctattttagcaaatcctggagatgtaataacatctcctctcgatatatccttagcagatgcccccttaatcgccagacctacacgagaatttttcttagaggtattaactgggtcatcatgcatttgaatggatttgatcaccacagttttgtttgatggacttagaactaactcatcataagttttaatctccccctgtttcacggttcccagaactactgtacctactcccttgacatcaaacacatgatccactacaatacaggctttagagggttggaggctctcatctcctttatcttttagatctgtttctgtttctgtttctgttttggattccatttcagctatactgtttttcagctgttctaaactatccagtatttgaaatgatgataagccagtattctttatgatatttcttattttttcaacgtcgatctcatagccatataaaataaaaccattttttatgccaaaaatatcaactgctattagctgttcgccaagaaaagaatcgagtttggagatattgatgataacgtagttagacattgctatagactgtagaagaggctgtagtttttcaggataagtattagggaaacaataagaaatgattttatcattagtttttctatcatatatggtaatatcacttgaagtccctttttttcccaactcattcgcaattgttgtatcccctagtaaaacaaaattaaaactattcaaaacttttgattagttagttttttttaaataaaatcgttgcttttagatcaaataatgatcaaataacccacaaattggaacattataatgcattgctttttatatagtacattcacatatagaaatcctgagctgaatatattaattggttagttttgaagaacttggtattgaaaaatctatagttaaagcattgaaagaaactggaatcgaacaaccatttcctattcaagaatcaataattccacttattttaaaaggagaagatgttattggtagatcgaatacaggaactggtaaaacagccgcattcgtactacctatgttgagtaagttaaatccgaaaaattttctacaaggactaattttagttcctaccagagaattggctatacaaattacaagtactataaatgaacttgtaaaatatagcaacctgaggtccgttgcaatctatggcgggcagaatttccaaatgcagaggaaaatactcaataaaggtgtaaatatcgtagttgcaaccccaggaagactcttggatcacatgaatcaaagaactattacgttaagcaagattaatttccttgtccttgacgaagcagatagaatgttagatatgggttttattgacgatatcaaagaaatcctatctcatattgatagtaaaaagcaaatttgtcttttctctgcaacgatgcctgactctattatgcagcttgccaaagatcaaatgcataatccgaagcaaattagcattgaaaagacaatttcacaggcaaacataaatcaatcatacctgatgctttacgaaaaggacaaatttcaacaattagttagcactttgaaacctatttcaaacaatgacgaaagtcatattattgtatttacggcaacaaaacaaagggctagagatctgacgtataaattgagaaacgacgacttttttgtagatagcattcatggagatttaaatcagagacaaagggaaagtaccctttcaagatttagaaataagaaattcaacattcttatcgctacagacgtcgcatcaagaggattagatattactactgtcagtcatattatcaactacgacatacctgatgatgtagagacatatttccatagaatagggagaacagcaagagcaggagcaaatggtaccgcactttcctttgtttcacaacacgacatgtttaccctcagaaaaatacagaatatcgcagcaaactcgctaaagaatttaaacacagaatatggaatagaagtagatttcaaattcaatagtgctcccaggcctaatcgctttagatcgaattatggtagaagaggatatagtcaaaatagggttccaggagaacaaaggtcaaggaataattatgacaatagtaatagcaggtatccatctaggaataattatgacaatagtaatagcaggtatccatctagaagactgagcggtattactagaccccttggtcgaaggaataattataacagagactcagactaagagagagaaaaagagacaggcgtacgtgcgcagtgtgtaacactttgtgtttgcgtttgaatcaacttttataaattttttaatattctatttattatcagatcatcatatagtcactgaattttctcacatactgtaaaattttgatagtcaagtaagccacaaaagaattatcgataaattagacgggacgggatcttttacatttagaatatagaaatatggaatgaaaaaattcagtcttgaaactactgtttgaaaaccagtaattcaattaaaaaaaagacggaaagatggatctaatcttattcgtgatggtcgccgcttaaatgagcgatttcattaacccctatgactatagtggatgttgctggaaagtcgatactatctgtagagttattttgaattgctatgtctgtaataggagttgtttcatctgatgcaacatctacatgatagagacagagttctccaggagtagacaatggatctacaaattctaattcagctggctgtaaattaggagcttgaccaattaggacatttacatcggtagaattagcatcgctacacggtagttttgctgcaatgtgaccattcataatttgatatggtgtagagtcatacagatggataaaatcgccttctggtaagctttcaccttctaataatatagtttgagaatccctagtgacagcgttttcttgagaggtctcatttccgttgaaatatgcctctacttcatctctaggtgttgcactactggcattatcagctccaggtgttgcactactggcattatcagctccaggtgttgcactactggcattatcagtaaccaatccatcggttgttgttggtaataattcttcaacgggcacactatcggtttcattagtgaaattctgctctgctgcatctgttgcattcaaagcctcagacaaggttacattttgttgtgcgtaaacatttccattaacagaaaatattgctgatgcgagtacaaaaactacaaaaatagttacttttgtactagtcgatttgttagtcattattttatattaaaaatacttgtatttatgtcatttttagtacaatcatcgaattattcattcaccttttttacatctttatgcctccttgatttcacaataaaggatattccaatcagagcagcaagtagtatgtaaatataataataattcactacaaaggtttgtaaaagatcatagattctttctgcaattggaacttgaacatcaacttcgaatttagagttcaaaatatttagggtatagaaaatgtccttgatatccacaaatagaacgtactttccgggctcactaaaggtataattaaaatcgtaatggccttgtctaaccagtgtaaaattatttggatttgaaaatacaggctttccgtctttaaaaatagaaaatgaaactggaagttcgattaattcatctcctgcgttagaagtaagacggaaaagaaaggaggtatctttgccaatcatgggtttagatggatttactaaaagctctaccacgtaatttcctattgtttgagtttgagtgccattaaaactagcatcattacctccaaaaaaagaatgtgcaaaagctaggtgttcagtgtcaagtggggagaaataaattaccatagacaaagaaaagaaagagacaaagaacaataaccaaatatttgacgcttgaaaacgtccaaagattctgactagagaaggatgataatttacaagaaatgttaaacctagaaaaacgatatatttaaaaaaaaacaaaaccttgccagatgaaaacatatcaataattggtcaaagtttaatataaattcaataaactgaccataaaaatactttatgggcacgaataagttctgcatttcttgacaaaataatatcatatattactcagacaaacttgaaaaactagggaaaatatatcatcaatcaaaccccctgattttctataaaatgaatgaatcctcaatcgactgacgagcatggcttgatatgccaaagaaatcagactattttaagaattcaagaatttaataagtctgattccatatgatgggtatattgacaaacgagtttcaaccaccacaagataaagccaaaaaaacagtccaagaatcagaagcagagacgacaatagtaatgctgccttccgatgccaacccgcttggaaatgtttttggcggaatgattttaaagtacgtggacctgttggctggtttagtggcaaagagacatgcaggtcatgcaaacattgtaacagcaagcatagatagcatgacatttctaaagccagtatatattggaaatgccttgattttaaaggcaagaataaactacgttaggagaagttctatggaagctgaggtaaaaatagaagcagaagatttaaacagttcccaaaaggttcacaccggcactgcatatgtaactctagtagccctagacgaaaaaggaaagccaacagaggttcctcaattgcgtttgagagatgaggatgaaaaaagaagatttttagaaggacaggccaggatggaaacaaggctaaagaatcggaaaaaataatacaaaagaggagccataacaggagtttatcgattttcaatactagtattgcgagaatgacccctagtcaactgcaactactacacgatatcaaacgtcaatagccaaaaatgaataaatcccttaaaataccttcacagcgactctagtgagcacattgagagtaaggaattccatgaaatcatcagtaggataaaggtacatttagtttgaaacagtagttagattttagatgtttctattactattagagaaagcgagattaatcataccaacacgattagaccgatcctgattggattggggattcactattattaatttcaactcaaaaccttagattcatcaaggggatatacatacacattagctttctcatcgtctatttttaaggaatccagcagtatggaacccttcaattctgatttgtctaccccccatccattttttcccagaatacaggtatcgtctatgtcatagttaagagtagcaggattgaatggctccaacgtaactctttcttcacctaacaaccctttggcccttatggattcagacatttttctgcccccgtcatttaacaaatacttaacaccatacttttctcttaagatcctaagtcctttatgcatatcaaattcttttcctgtatcaatgtaagtgataagtcgggattctttgatggtctttgaaagatgggcataaaccgtactggtagtaagtattactaccttttgattgtttatcgggttcaacattgctatcttatttttttcataaaattcaaccaaatgtgattcggcaatactttctagtgaacggacggaaatgataaaataaaaattatctgggtgaacaagtttccttgaaagattcaaaaggtcattatgcagagatggatgcggatcctttaagtgctttccaaaaaaatcccaagaccaaatttgaccgtagttctccatcatgttatttacagttaccacaatagcttgatttcctaaaatcatacgatgcagagaagcaaatatattgtcacctagctttctactcccgcctgtgagcaacgtaacaccccctcctctcaatccaagtaacttaaaaataaaaacgccactattgggtgaaaaagcttcggctgcaataaaacttgtagcttgatatggcacactcaacttactgacgaattcatccgaagcgccgattactatgtagggaattattttagacagatgattacagtttaaatccctattagtatcgtatattttgatacctcttttcttataatgagtaaaagtatcgtgatctaatagattattttcaaatagcagtccgagtttatcaaagtaattctttttgatcgaatcagaatccatcaggttttttatgtaaaaacacaataataagtacacacttgattattcattctctaatttttgaaatacatacctcaatcatttatgatcgctattcctgattataatgttaataacataagaaattcaaaagtatgttcaatatccgaaatattatggacattgtggtttgtttgagtatttccatttcgaaatgaaattgtctattttattttaataaagtaatcaaatgtgatacttgaacaatcaattctttatacggtgatgaataacactgatctagttaaagggtttgcaaattgcaatctacaggatatcaagagaaagacttcaactttgaataccacaatgattgcatttaagaaatgaaatcatcgaatatgacagatttcgagcaagatcaagaacaataaataaagccaaaaaaaattagctgttgtagttgttggcgcaatctacaatttcacctgtggacaaataatctccttggtcatatgctctttcaaagcaggtagtaagcaataatttgcgctcttgtttattcacagtgttttcgttgtatacttttgcatctttgtcgttatcattgttatcatcatcattgttgttgtcttttgcatctttgtcgttatcattgttatcatcatcattgttgttgtcttttgcatctttgtcgttatcattgttatcatcatcattgttgttgtcttttgcatctttgtcgttatcattgttatcatcatcattgttgttgtcttttgcatctttgtcgttatcattgttatcatcatcattgttgttgtcttttgcatctttgtcgttatcattgttatcatcatttacatttacattcatattgttagtatcgttaggattactattatttgttacaaatgaggaggattgtgcgggggtagagctaccagcattagaatttgtatccacgactcgaactacgcctacgccagaaccatctgtcacgccggtttgaggaccatcagttgacgtcaaaccttgactttggctacttggtatagaagaagacattgatgggttgctgctgctactgctgctggtacccatgtcactaccactattgttacaattttcagctgatgatgctgtatacacataacttgtcatgaaagtcactacacaatcagcattttgcatggcagagtctttattaggatcgtttggggatgtatacatttgaaagttattgttgtagtttaccagatcacccgtagcagcattaaccaatttgattgacgaaaagttaactgaacttataactaataataagaaaattgcagatatgaaacccgaagttagtttattgtaatacattgtcatgatttttttagtggatattctttatgaggattgtttttaataattatgtacttatttttttctcaatactataattcaattctagtagaagattagttgtcattggtttctcttattgtctttgaacagttattgtagtttaaaaggaaaagtaaatattcaaataataaacaattaaaaaaaaactaatgacaataaaattattgggaattgcaggaagtatgaggagcaattcctatagttttaaagcattggagcacgctttaaaaatagctaagaataattataatgcagagattaatttatttgacctcaggaaatatagattgcctatttatgaacccaatttagatcatgatcaaattcaaacagcagagaaagaaagcttacaaatagcaaatactttggtcaaatgggcagatgcgattattttgacttcccccgattatcatggctcaatgtcaggagtattaaagaattttctagactatttttggaaggaattttctggaaaaacatttggatacatttgtgcatctcatgaaaaaggccttacagtaatggaacaaatgaggaccgcagtaaggcaatgttacggttggagtatgccatatggcatatccacaagctccgatgactttgatgatgcaggcaacataacaaataaaaaaacactactaaggatagaaatgctatctagagatctagtgtattacggaaaagctattagaaatcaatttctcacagacgcatcaaataaagtcaaagaatcttattcatttcttacatcaaataaagactgaacaataatactaataaaagcattttattagtttctactataatttaaagacatagaaaacaatcatatgtcttaatgacaatttaatcaataattacataccaattgtacaaaaccaatacaacatcttttttaaaatgggcaggtggaaagagaaggctagttacattattagacaaacttacacccactaacattgacagatatttcgagccctttttaggtagtggtgcttttttctttcatttaatccaatcaaggaaacagttaaaagcttacttatcagattcaaatcctcatttaattaacacgtacagagaagtaagagacaacgtaaatgaactgatagaaatcctgatggatcatcaaaaaggttatcttaaaaatggagaaaagtattactattctgttagagatgatcaaagtaataaaaccaatacagaagctgcagcgaagtttattttcttgaataagacatgttataatggattgtacagggtaaacaagataggaaattttaatgttccccatggtaggtattttaatccaaaaatatgcaacaaagagaagcttaatgattgctcaagtttgcttaatagtgcggaggtaaagattgtttgtgatatttataaaaatactactttaaagtgtaaagacaatgattttgtctatttggacccaccctattttccagtatcaagaacatcaaactttacagattacactaaagaaagttttggaattcagcaacaccaagaattggcgagtgagtttgacagactagacaatattggctctaaagtattgctttctaattctaattcagagtatgttaaatcattatataaaaaatactgcattttaaaggtgaaatctaccaggagtattaactgtaatgcagatagaagaagtgatcatcacgacttgataatctcaaattacaatagaagaataaaagatacagagaagacaactcacaagttaaaaaagcctatgatatcaaaaatagtaagcgactgatgcatcgatatatgcatgcatatacatatgcttcctatcaattagtaataaaaaaacactaaaattcacgagcccactcagattaaacctaccatacggagtttttgaggcaaataggtttcggataaatatttaaatccatgtttaaaaaaagcatctaattcgcatttttcctttttatgtagaaagagatttagttctttttgccattgtttattttgcatccaaggcttctttttcatgtcattggctctattaatatcttcatcacttgctgtcaaccgagcaacttctggaatgttatattgataaatatctgaaaacatcattccaaggacctgagcatttggagttaccagcctttcactatcataactcaacgattcactaccaattttgtaccttaacgcaatacctaagccccaaggatctgcatcggcaaaaactaccacaggttttttccattgttcatttagaatcttcaccatcattcttgttgcacgatccggttcacccgatccagtcaataaaatagcgttgtatttctgaataaaaccagattttcttatattatttagaacagtgtctttttcgaccaccattacaaagtccgccttgacatcgtctatttggacatcccccatgttggttgggataagttgagatgtagctctgcttccaagattgcaatctatgatatcgccaccaacccgtaattttatagggccagaaatcattcctttaggtttggaagttacagaaaactcttctctcgggattccagttaaaagttcgacagcttttattgcattatcagaatcctcttgacctgtccaaaatttttgcttgtttttatcatctcctacattactaagggttgcataatacatccctcgaatagtactttccatttcttcatcaagtagtttttttaccgcattggccatgaccaaatattgagcaaaagtgggtattttctttacactgtcgggactaacttcaatttttttgtcacctgttgtaagcattctcttttcatcagaccaaacagtattatcatatcctatttttggtaaacccaagataggcatttgattttgcttgatcacatcatcagatatttttctcataatcctttttatgatagtcacaaattcttgtttttttgcagtagacaatagatagattatttatttctttttacccttatttacccttttactataggaatctatcgttgattgaacttctttggttttagattgatttggagatctgttaaaagatttattcttttttgctctgttagcatttattttcacagcgagattcttgtttttcttatttgtagtgctcttttctttgatgattaactccttgtttgttcctttgggttctttatttttagtaacatttcttggagggtcaaccttacttaatttaccagctaagctcggatcgacctttttattgtcttttttcttattttctaacttgttcaggtttggtttagaagaggccatgcttttggtcttttggatatctttggtcttttggatatctttggtcttttggatatctttggtcttttggatatctttggtcttttgggtctcctgtatgtccggctctagatctatatccacaagatccattttttgagatggttgaacgggtaaagtggactcagcagaagaagcgtctcccatgtctatttggggctttttagataaatgattctcaatcaatctagtaaacgattcgtttaattttgaatttttactaccaagtgattcatttattgaatctactatgaacggtagatagtgtttatatagtctgatcttattttctgcctcctttaatttgagctctttgcgtatttgtgtacttaatttcctatatagttcagatagacatgatttcatatagtatttcagttcgccttctgaagcaatgctttcttttccggcggttttataagggattttggtcgaacaaatatggaaaaaaatatgcaacggcaaaacctcaatgactctatctttttttgattctttgttgacagaaaattgttcctttgcttgttttttagtgatccccatcttattaatttctacttctgatataacctctctagcgacgtcggacccttcatcgtataatagaggaattttattagcaaaacgatataacttgaatgacggaatatcaccaccataagccaaaccagtttcaacaactgtgggcctattatttatgacacatgttcttgatgtataagtggtaaggacaggtttgaggactttaactgaaaaatttgattttgataaaatatttttgaatggtgttggtgttggtgtttgttcgtcattttgttctgattcaaaagttgatgcagtaacagtatcattagttacttgaggattagaattggcattagtaagaataggtttttcagctgtggcaagggcgggggcaggggctgtaaccgttactcctgtattatcattccctttatttgatacaatagtatattctgacatcattcctattgtgagaacttctcgaccaataggactcaaatgatctgtattcggattctggaatttagtttttttgcaaatgtttacaattttaataagatcatgctcactgaaatcaccagtagaggtctttaatgacaatccagtattagtaacaatatcctttgctttttcataagaaagtttctgaaaagacgaacttaaaatttttggtaaagacattttttgagtttggaatttagaaatggctttttttaaggtttttagatccatatcagaaggatggggcaagatttcttgtgccggattaggcattattgatgtccttctattaaactgaaatataccatcatctgtttcaaaggttatggatgaatatggatttacaatactcgtttcagaaacatactcataaattttgttcttagtaataggtaccaactttgctctcaaaataacttctatccgaaaaccagatgtgtcttgaatacgagattgctgtttaggctgcaatttttttgacaatacaataggtttattggttccaatatcagttcttaactcaaaataatattcatcctgctcatcaattgatttattccatacttttattggaaaatcggtatcctttgtagaaaaagccgctaccattttcaaaccaactccaaacagtcccctttgctgtttctccatgtatttagcagaagttagaaaagagcaaactgctatgggtagtttatctgaatttatcccggttccattatcttcacacgccaacatccataaatcattagcttgatcaaaaattcttaatgaaattttaatagacggcagaatcgaaaaactttcgcaagagtctaacgagttttctatcagctctctaatggccatgtataaaatacgttcaccggtaaacccagctaatgcggaattatccacaaaaaattcggattctgccttcttattataaataattttatacttttctagctttgttgttgattgagagatatccctctttaattcttcaacttctacttttactttgtcttctgcagaatctaagacggtggaggcagatttattcggcatcaaatacttttattaatatcttatttgatttaatcgttattcatgccccttgtatattatttgcttaatctaatcgatttgagaaccatatggcgtagatgaatttttcagttcctttaatgtaggtggaagaatttctacataataccgttttctttccttttgaataactagataatccaagccagagccaactatatttccattcaataattctttaattttcaaccagattaaatagatacattagtcaatatttttgggtttccatgatatagaatttgattttaaaggttgacatgatcatgctaaactgtcagacaaacagttaatttatcaaacaactgtttactttattagttttcaaagagtagtgtaaaaatatttaagaattcaacaaccaatgttctccatggatgccagatgtgtaaattgcaacaacaaggctaattttgatattgaaaagaataagataaaatgtgaaaaatgtggaatagaaatagactacgatgagtatattgaacagatgaaagaaaaagctgttactttagcagataattttcaatcaagttgggataagggaggattctaagtaatctaaaaaataacctgaatgctattggtttgttggaaaaaaataaaagtttagagtgaaaatttctttgaactgaacaaaggatgatgagaaggaatgtaatttttagcaagattaattaaggctgaaaatttatctaataaagactttggtagaatttaaagtagttatttcagattcaacgggtaaaagcactagtcaagagttaaaggataagagtgctcaaccactaataggttctaagcttggagacatattagaatcgtctattttaggatttaaggaggggaaaataaaattaaccggcgggagcgacaaatcaggtacacctatgagatcagatctacacggtgctacaaaaaaatatgtcctcatgacaaggggtgttggaatgcgaaatctagcacctggagaaagaaaaagaaaattggtcagggggaatatgatcacagaggaaatctatcaattaaattgtcgactgattgatgcgacattgcctgaaaaagagcaacaatcttcaacacaagaagaagcccaggtaactaaataaattcaaaaaatatttctgttatcttcatctcataattatgaggttagtactttaagtaaattaatatttgaaaggaaaaatacaacaggtattgcactggaaggatactttacctgagtggtatattcaaaaatatggttatcaaccatgtataaacataggtacctcaggacatgtagatcatggtaaaactacacttattgaagctataacaggagtttggacaagcggtcatagtgaagagcttcgacgaggaattacgattaaagtgggctatgcagatgccgctttttataaatgtcccagttgtcagcctccatcaaattattctgttcaacctacatgtggtatatgtaattcagaagcacagttatcaagagtagtaagtttcgttgactcgcctggtcatgaaagtttaatggctaacatgctttccggaggtgctctgatggatggcgcaatattagttgttgcagccaacgaaaaagtgccacaaccacaaactagagaacatctattagcattacaggtattagggattgaaaatattgtaatcgtacaaaacaaagtcgatctaactgaaaaagaaaatgcagtagaaaattataaccaaataaaagaatttgtaaagggaagtgtagctgaaaatgctccaataatccccatatctgcacaacataaagcaaatatcgatgtattaatcgaatacattgaaaaatatattcccacgccagaaagaattcacaataaaaatggtataatgcatattttgagatcttttgatatcaacaaaccaggtacaccaattaaaaacatcaaaggaggagtattaggaggggctttaattcaaggtgaatttgaaacaggcagcgaaatagaaattttgcctggaatttacaatgaaaagaagaacaaatatgaatctattttttctgaggtagggtcattagctactggtgcaggattggtggacaaagtgaaaccaggcggattggtcgcaataggttcaaaactggacccgtcatttataaaaagtgattcattgatcggtgcagtggttggaaaaccgaattcattacccccagttgtcgatgaaattacgatagacattaatttatttgataccgcggttggaacacaggatttggtcaaggtggaacccatcaaaaccaaggaaaatttaagattgaatatcggaactgcggttactataggaaatgttacgaattcaaaaaatcagaagatcgaagtaaaaataaagaaaccgatatgtttgatgccccaaagcagagtggctttaagccgaagaatagcagatcgatggcgattgataggtgcaggaatagctgtataaatcaagatggaggttatttctgacactagttttttaatggttttatgttatgatccagtcaaaaacctggacgctctagaatctagatttggaaaactgctatggctcattcatccagagacgattaatgaactagcacagttagaaaaaacggcaggaataaagagatcaaaaattgccagtctttccttaaaaataataaatgatcggataaaaaaaggggatttcaagtatttagacaacgatgaactcaataagttagaaataacacaagccaattcaacagtcgattccatgttattaaatatctcagcagaaaaaaaactcccattagcaacgctagacaagaatttaataaaaagggcccttaaaaaaggagttgatgtattcacattaaaaagcaatagaattatttttgtacattccaaagttaggtcaaatttaaattcttcctgattactttcattatacatatatgatgaatattgaagggatcgaaatatggtggaatggacatgatggatttagaattgaagtaaatggtaataaaatttatgttgatccgtataaattagtttcatcatatgctcgcaagagtgatgcagatatacttttgatttctcataatcattttgatcatttaagtatagaggatattaataatgtgataaacgaaaatacaaaaataatttgctctcatgaatgtgtcgaagtattaaaaaataattataaagataatgaaataattcccttaaaacccaaagaagcaaagatggttgggaatatagaaataaaaggtatagaagcatataataccgataaaaaatttcatccgaaaaaagatgaaaaaattggatttatcataaatgtaaatgacttgaaaatataccatacaggtgacacagatattattccagaaatggaaaatgtaaacccagatattttatttgtgcctgtttcgggtacttatgtaatgaccgcaaaggaagctggaaaagccacaaatgagttaatcaagcccaaaaaaatagcgataccgatgcattatggatccattgtaggaactgtcaaggacgcagaagatttttgcaaagatgtgaacatttgtaaaaccgcaataatggaaattgaataaaccggcataatcaaaaccatcatcactaagaatgattaaataaagtttaaaaaatcataataaacgtgtaggtaatggcaggaagagagttattaaaatcagagaagagtcgtaggacaactaagtatcttcttataatcgcagtattatgtttagcttttagcattgcattcattcttagagcatacccaatcaaatatggattttatttgaatgaatttgatcctttttttgattttagagctacagaatatatagtaaataatggatatggaccgtatcttgaatggcatgactacaagtcatggtttccagacggcagagaaattgctgaaacgtcgcagtctggcttacacctaactgcggccacgctctacaaaatttttggtatgaacatgtctttaatggatttcacaatatggtttccggtcgtcataggatctgcatccactgtacttatgttcttggtagtaagagctataaccggaagcaccattccaggattaatttcatcccttttctttgctgtgagtcctgcaataattcaaaggggaaacctgggatggtttaagtcagagccactgggtcttttttatggattaggcggcacatacctgttcttatctgccttaaaggataaaaaatacaaatttttgatccccaaagcaatttttggaggaatcttaattgggctagcagtaacttcttggggtggagctcagtatttcgtaatccctatcggtatttttataatagtccttgggtttgtttccaaagatcttaaaaataatttaattgtggcagttctttttacggcttcagttatcttagttgccggggcttttccgaggccaggcatgtcatttgttcttggattgccaggtttattgttaatgactagctcgctattcctgttagtcactaccgtagtaaggttaaaaagttctgagagaagggcgactttaaaaactgcaataattctaggaatttttgcaataattggaatgtccatagtggtcggtggcttttacaaagtcccttcctttagatatctcaatgcaataaacccatttctttcgtcagagaacaaactagtagagtctgttgcagaacatttcacacctacgatagtagactactttagacagttttcaattctgatcatttttgcggggctaggaatatggctagcatttaagaacaaaaataataccaatatgatttttgcattgattatagggcttaccggaatttatattagtgcaacatttgcaaggcttttggtatttgcgtcaataagcataattatattatcaagtataggaatctatcagtcaattagagccataacatcgatcaggacagaagcggaacaaacactagcaacttcaaataggaacgaggcaaaaccccaaaagaacatgaaactcaaaaaacaatttttaccatatgcaggatttgcagccattttggtagtaatgttatccattcctatggtttacgatactaacacaaattggataacttctgcagatgttcctacatccattgctaatggaggtactaattatcgattaacaacggatgattggatagaaacactagattggatgtccaaaaacacaccagttgattcagtggtaacagcatggtgggattacggctattggatcacaacattaggaaatagaacatccattgcagataatgcaacaattaatcaaacaagaatagaaacaatagcaaaaatgttcattagtcctgaagaagagggatggaaaattgctaatgatctgaaatcagactatattttgatatatgtagttggacaaaaattgccttctttggatcctagcaatccaagtcccctatatgtattaggaagcggtggagatgaaagtaaaaagcattggtttattcgaataggtggatttaatgaaacagaatatgttgaatctaatggagatacaccaaaacaaaagtactgggattcgcttttggggaaaatgatgccgtttcaaacgattggattctataatccaagtagtggaacattatcgccaacatatcagcctaatgcgatacccttttacataaaggatataaagtatccaaaaaataacacttcagaaccactatctctagtatacgcttcaaagagtttcgaaagtgatgagccaggattattttttggagtgttggtgtacaaagtgaaccatgatttcaaaacaaacaatgcaaatggcacctcctcctccaatactactaccttagctaacaatctaacaaatggcacctcctcctccaatactactaccttagctaacaatctaacaaatggcacctcctcctccaatactactaccttagctaacaatctaacaaatggcacctcaactttgtttttagaatctaatgttttaaataatatcaacaatacaacatcaaacaataatatgactactaccacaaataacacagcaactattgaaactactcaaggtccaataaaaattgaattttatcctgatgtcgcaccaaatcacgtgaagaacttccaagatctggctagtaaaggattttacgacggtgtagtatttcacagaatagtaccaggtttcgttattcaggctggagacccaaatacaaaaaatgacaatagtagcagagatacttggggtactggaggtcccggatacacaataaatcaagaattcaacagcatacctcatgaaagaggaatattatcaatggctcgaacaaatgatcctaatagtgctggttcacagttctttattgtattaaatgattccaaatttttggataatcaatatacagtatttggaaaagtaacagaagggttagaaattgttgacaaaattgcaaactcaactactaacgcaatggatcagccggaagatcccaatacagctcgaatcaataagatcatccttcaatagatcaagctccaacctccatctaagaagtacattttttattttgatatcaatccgtggtaaatgaatggtaacacagtgctcacatctgcatgtatggtaatttgcttagcttgtgtagtaacctttccccacgaaatagcctcggcaactggagctccgcttaagcttccatcccattcagatgcggttgtaatatatacagcatagtccagtccacctctatactgattccaccatagagtatgatgttttgaaagtcctcctcccatcatgaaagctccagtcttttttgcatcaaaaattatctcagataattttgtctgatcttttaggatatcaattttgaaatctttatgagattgattaaataaccaaatctggttacccaccgctccatcaacaatccctggaacaaatacaggaatattgttcttaaaagcccaatacaaaaaggacgattcgtttaagtgacttccaatatatctaattatttcagatggtgcaaattctcccgaagattttgaactatcgtataatttttgcaaaaaagactgaactttattttcaataagaggtccataatttttgttcggaattaagatgttgcctaatctatgaatatctttctttagtagaaattgatcatctaatctaaaatcaccttcataatatgaggaaaaggatttagctatatcgtgatctaatgcaccgcacgttgtgataatgcaatcaaacatcttattctttatcatatcacgtacgatacctcggttccccgtagaaataagggcaccgacaaatgatatgaacttcgtacagtttttttcatttagcatatttttgagtatttcaacgccattagccaaatgccttccctcaaatccaccggaatcagccatattttttaaaatctggtttatcgatgttctttggtttatagaataatcccgtacatccttggataaataatttggactatctctaacatcaacattcttttttttgacttgtctcaataaaatgatgtaaatattttcacattaataaattactttaaattatatactttactcgatgttgtctaactggattacaattataataagttcgatctagattaaagggattgagtcataaccgacatagtttttcaggaaaaaaaattgaccccccggaaatctttgcgaatatgaatatatcagaattgatagatttattcagaaaaacaggatataatgcaaggagattagcagaggctgcagacattatgaaaagaatggtagaatctgatgcgacaatttgtttgactatagcaggagcattaactccaataggatttgggaagattatatcaagtatgatagacaacggttttgttgattggattgttacaacaggtgcaaatgcctatcatgatttacactttgcatatgacttgccggttaggcaaggccattttgatgttgatgatgatatattatattcgaaacaaatcgtgagaatttatgatgtatatataaaagaatatgggacccttcaatcccaggatacaataattcagagaaatattcaaaatatataccaaaagcatatcgacatgacaaatagctcaactgctgatctatcttatttaataggaaaagaagctgctgaaaaatccaaggcgcctgacaaatcatttatggtctcagcatacaaatctaatgtccctgtgtatataccagcactcagcgattcttcaatcggattgaacatgctaccttcaatgcttgatggaaaggcagcaatcaatcctataaaagatatcgcagaatcaacagcaatcttatggaaaagtaatgtgtccggtggtttagagttgggtggaggagtacctaagaacttttttcagcagactggtccagccctgtatcaaattttaaaaatcaaggaaggaggacatgatttcataatccaactcaccgatgcaagacccgatacaggtggtctatctggagcgacattacaagagggtaaaagttggggaaagattaaaacttcgcacaaaggaaatgtaatagtttatggcgatacatcggtctattttccaattctttgttcttatttgctgagtgaatgtaaaccaaggagtaaaaaacaaatctacaagaaaaaggactcatgggttgaagagatgaaaacacaatatataaaaaaaaataaaaccaaatagcagaatgaataaaataatagtaatatagaaaaaacagaaaatagactaatgtatctgtatacacatgtcagaattcaatcaacttttggtaagaagaataagaaatggtaccgtcattgatcacatagaatcgcccagagcactgcttgttctcaacatattaaatattacaggtcaagaggggaatgtaataacagtagctttaaacgtaccaagtgttaaacagaagaaaaaagatatcataaaagtggaaaacaagtttttggaaaagaaagaaaccgacaagctcgcattaattgctcctaatgcaaccatcaatattattaaagattataaattaaccgaaaagagaagaattcagcttcctgataatataataggtttttttaaatgccctaatttaagatgtattacaaacaccgaagaaggattaagttctaagatcgaaataattgacaaaaaaaatatactattgaaatgtcaatattgtgcacgatctataacgactaatgaattaattaagtagaacataaacatcaagaagaagactaagaattgaaaagaggaagagagatgaaatcgtttttggtttttagtttttgttattttcaaatgatttgaaaaaagattgaacgttttatgatacgatcactaattcattcgtgtgtaaatgaaaagtgttatccatcaataaatgcacaatactatacgatcaaaatatgcttgtcaacctgtattactcccctctgcaaacttcacaagtgtaagaaccatctgcataaagtagaaaatcagaccattcaccacattcatcgcaatatccagaaatatttcgtggagaacgtccaatctcgcctcttataagcagtgatttttcagaaactacatcaaataattctggtgtaacggcaagaacatcagacaccgaaataattccgactaagttacctttatgtgtcactcccaaacgcttaattccatgttgtcgtaaaagtctggcagcggatgtaatactttcctctccagtaattgtaatcaagtggttcattatatccgaagctttaatatcagatgggattgaaccggcagctattgctttggaaacaatatcccagtcagtaattattccaagcggtttatcgttatctaaaataataatgcttccaattttagcattcgtcataagttttgaaatcgtaacaaggtcatcgtttggtcctgcatgaactatagggctattcatgacatcactgactaatacacgagtggtcatggcagtagtttcatctctaatatctttagacacatcaaatcttcagagtttgaatttaattacttttctattcttatttctattcgtacccatcaaaatttgaatttaattactttgataaaaaattattgaaatcatattttaactcgcctttttcaataggcaatagtttgaattgacctacaggtaagattcttactatttcatctattgataaatgctttaaatggtttatcaaacgttcaggaaattcattttttatagagtaatctacaaaatcagattttattttttttgaagcctttacaacatcgaagcctgatggcatcatatttcttaaatatatggatcttttcaagattgcagagaaaggtccaacaataaataatggtctgtcttcaataaaagacaaaccaattgcaagctttatttccaaattttttacaaaatttctcttgccttcaattataaatgccccttttggaagaaactgacccgtaggtgcgcctttttttacctgagtaggatagacccaatatgcatcagcagaagaaagattatctttccaagacctactaaaagatacagttgcctgagcagtttcaatgatactttgtgacaaatccgcgctggttttgttattagcgttttttaatataaagaaaggagaaccattgacctctgcatgaaaaacatagtcgttttctgtaagatgtcttcttattagtactgaatttgacgatgaatccctgccacctatagccaacacatcgtcagttgaaagaaaccatcgatatttttcataccattccttattggtcaaaatcttaatttctgatgatggttttttgtttttctgtttttgaattttgtccatttgttcaatcaattttgaatgagaattttctatggtaatcaatcctctttccatgtccttggcgacattaaatagcaaggaagaaatttttggaatgttagaattccctatatctataggtattttttcatctacaatctctagataatctttaccttttatgctcaaaattttagcatcagaagcatggagtaattttgtaatcgagtgtttttctggattcaacacaccgtcagtctcttgcataagcagattggcaaattctctgagcttgtttgattttgcgataacaaggtctttagcttttttctgttcatccaaatcatgctctaatgactcgatctgcttttctaattcggagtttctcgatgaactagtatataaaacggaatagtttaggaattcatcaattgcatcagtgtacaaactatattttctaatatgatccagaggaacatcggatggtgttattgggcttacatctgcaggattattctcatcatctaaaataatgcatggttcatgtccaataccggttgaaatatttcttattaaagaagtcaattcttcgaataggttctttagttcaactgaagtaagatctctaactttcttatttgggactttactattttgaactgccaattcgataaatttctttgaaattgataatgttcgtcctaaccatctttttatatcaatattgtcctgatcgctattcttgattaaagacaaaaaatcgtcataacctaaagatagtggatcagctcctctagagggagggggaaaatacttcagcccaggtttcaacaccctatgtcgaacgttaatgggatttagaatattcaaaatcttgtgagagtcattgcaaattattatgttgccatgaccaaacaattcgacaattaagtaatatttcattccttgaatagattgaaaaacaaattgaactattcgttctccaggtacaacagagatatcgatcagtttcgagcgttcaagatcagtcttaattttttttaaagagtcattatcttcaataattgaatatttatatttggtaatacagattccaaaggaggaaactagaagtgaaacatcatttttttgtgaatggtgaaattttaggatcagagcgttttttgttataagagaaatattgcttacataataaacattatcaataactgttttgatgttatttacaatatatctaagttcaatctctgaaatagccatctaaatttatcatgatcttgttgaatataataagatacaatatgccactattcagaattagattagcagaaccaaatgaagttgaattcaagaatagattattagaattgattgtattgtgagactgtgttcaaacccatggatagtccaattgggtcattgtgcttgcagactttgtctttttctgatcgaagaaagtaggaattaaatgtggctgattaaaaactaatagcgcatatccttgcaaatagaagataaaatatattatttaagagtcgttatggctgcaatcgcaggatccattttgggtgccatcgtaaaacctaattctgatcaatccaatactataggattaacaatattagtaggcattattttttattccgtatctcatataattgcaagtaggatggttggggacattcctaaagaaaaaaagaaaaaagtaattacaatagcaatttttggttttattttcatgttacttacatttatggtattaacatatacggtgttaaaccaacatatcatatgaaacgatggaaatgatttggaattataaaactcctggcattcctgatgaattttttgacaggatagacaacgtaccaattacaaaagaagacatacgatctataataattagtaaactacgactaaaagaagggtttacaacattagatattggatgtggtagtggcagtataactgcggaattgattcttcaaacaaaaggtaaagtttatgccattgatatggacaaggctgcgattgacctaacggagaaaaatttatcgaaatttgggatcttaaaggatgccatgattattcatggattagctcaggatgtattacccaagttgcctaatgttgacgcaattgtaataggtggaactactggggaaaccaaacagataataaaattagctatttccaagttaaatcaaggggggagattagtggtcacatccatcttgatagaaactatatataatgcacttaggaccatgcaagattcggaattgcaagagatagatataactcaggtgactattgcaaaggcaaaaaaaaccagctcagggactatgatgatttcaagaaatccggtaataatcttctccggtacaaagtaaaatacaaaaactttaattaatattttctaaaaatcctttatgggtaattttacactacattgtgttggctgtggtcctggtgatcccgatttgctaactttgaaagcaatcaatgttattaaaaatgctgatgtgatttataccccaactgctagagagaataaacccagtgttgcattgtcaatagtcgaaaaatttctcgccaaagaaactgaaattcgtcaattagtttttcccatggtaaaagattatgagaaattaagagaacattggaagagtaatgccaaagaaatagcagatgcggtcagaattggaaaaaaagccgtttatttaactgtaggtgatccatctctttacagtacttggatatatattcacaaagaaatgtgcaagacccataaggacattgagatagagatagtaccaggaataacatccattttctcgttttctgccgaaattaaaactccgataggagaaggagaggaaataataggaataattcccgcatgttataatctagacaggttaaaaatagcagcagaatgttgtgatacactggtgttcttaaaggacggtcgatattttaataatgtaatagacatactaatggaatcaagttttccagaggattcagatatttttattgctgaagatgtctcaaccgataatgaaacattacaaaaaaggaagcttgttgacgtggcaaaaaacaaaaatgaaaacaatgataagtacttttcaataatgatagccaaaaagaaaaaatgatccaaaagaatacagtttattttgtaggttcaggaccaggagaccctgaattaattacaataaaagcaaagaatcttttagaaaacgccgatgtaataatatattcgggatcgttattaaatcccgaattattgaggtatgctaaaagagatgctcaattacacgatgcagcgaaattagacagattagaaatatatgaaattctaaaggattctacaagaaagggcaagttggcgattaggtttcatgatggagacccagctatttttagtactataagggaacaaatagacagattagagaaagatgaaatcgaatgtagtgttattcctggaattacatcacttcttggtgcagccgcatcgatgaatctagaattaactttgcctggtattactcaaacaataatcataactcgcgcagaattcagaacacctgttccagaaagagagcgaatttcagaattgtcaaaacatggatcgaccatggcattttatttaagcgtgcatttacttgaaagggttattgaagaattattggagggtggagtttatactaatgatacaccagttgcaataatatataaagcaacatggaaagatcaaaaaatactaaagggtactctgggtaccattacaaagaaagtcaaagaagaaaggattgttaaaactgcattaatagtggttggagatgtgatagcaccaaaaaaatatgaattttcaaaagtttatgattcacagtttacccatggatatagaaaaagtaaagagagtaattctagctcttaattgagagggacacgctgtaattctttttgatttacagtagcccaagcccccatacctcgtccctcaggtccattgaaatctataatttgactcaatatgatttctgtagaagccattggaggccataacattgccatataatcgccctcattacctggtttattcatatcagccaaaactaatttttctgttttcaaaccaatatcaccaagtcttgatttaacagtttcaaataattgcttttgaccatgaactatcacataaacatttttttcggtatcaagattagacatactaaacctaatgcggagtatttataaaatgattactaatcatcaccatatcatacaagtccatggcggtacaatttcattttcaatatcattatcatcatcatttttaccagtcaaatcaacaacctagtaattgaaaaattaatcgttttgaagaatttgttaaaaatgtcatgagaataaataggatccaatagtacaattactcaggattttgctatcattgattattcatttctcaaaacatcaatgataaaaaaatagtagaaaatcacaataatttgtaaattttgtatgaatttacatacctagttcgaaaaacacacttgtagaaaagaatgtttaaatatatttaaaatttgcaattactaattaaaaaacatttaataccatccttgattaacttagatgcaacatgacattaccaaagggatttggttcacaaactaatactcaaaagaacagaacatttgatgaatggtgggcaaccgtacctggagatttgaaaacaaaagctcgcaagggcgatgaagccaacaaggttttattgaatcaggtaaattatgtgttactccatcttcatcttcagggtaaacacgatacaaaaccatcacatgaagaattaaaagactggcttcatagtggtcaagtagacgtaatgcgtcaaatcaaaaaataatattttttttaaagtaatatttttttattatatatttaatataacataaaaacaacgaaaataaaatatatataaatatactattagataaaaagtattcgagttttgaagagaggtagtcatatagcaattttcgatacttttaaaactcatcaagcaaaatcaactagagaatccaagagacaaagaggaataatagcacatatagcgttagaaaaagacccgagtggaaaaactaggacttcaatagctcatattttagccaagaaatatggggtagcctggcaaaatatttactcggctatttttaaagatcttgacgaggtattgatacccgcaaacgtagtaaaagaaggtggcagattaccaataaaaaggggtccaaaagcccttcaaattgagggaataccgtactatgagctcactaatacaggccttataattgcatcaaccattgaggaaacaggtgacattagattgcgaatgaagctgcttgagctttacctattgaattcaaatgcgaataatacaagcattaatgaaaataatagtataataaatgacggaattttattactatcacgatatgccccgacctttattttgaaaataataaacgagtacattgtggcatataatcgtggagaaatagaaagactagataggcttgacattgaaaatcttaagaaggttatatccaatcaaataacaattgaaaaagaattggtagaggcctgtatggtgttatctaatgataagaaagaagtattaaagaactttatagaaaagattagttaatgaacggcatcgagatgctatctcaggtaatgaaccggtattatttttagatcaaatgccaattcggtatgaaagaatacggatttggcttcatctaataagacatttagatctttatatctactactaaagtgggtcagacataatctatgtacggaagccattttagctagagttgcagtttcgatcgcagtagaatgataggattcgattgcccttgtaagttcattggatgagaatgttgattcgaagatcagtaaatcacaatttctaaaaaaatcgcacagactgtcagatggacgcgtgtctccagaaataccaattttcctaccaggtcttgtaggaccaacaatatcatgagaataaaataatttatcatcataaatgacatcaacacctttttgaagtgagccatacaattctccttcaggaatacctaattcttttgctcgtctcgcgtcaaattttccgggcctatcattttcaagcaaacaatatgcatatgaacaaatattaggaccatgttcggatttacagtataatatcttatagtccttttccactacaacagttccttgagaattaggaattacatgaatgtctagttgaaaagttaatttgatgtggagcaatttcatgttctcaactaagaaatcatatattagttctggaccgaaaatatcaaccgcggccttcctaccttgtagtgatagtgtttgtagaaaacccaatatgcccaaaatatgatcagagtgcatatgagtaatgaatatcatagttttcttattaaaccccaatccagtacgaataaaattatattgcatcccctcccctgcatcaaaaatcaacaaagtcccatttctatttactacaagagaagaaagtgaccggtctactgcaggcatcgctgcagacgttccaaggaaaataacttcgagatttaccatctaatgctcaatcacgtgataaaatagaggacaaggtttttgcaatctcgctactcaaatcaatctttgaacaggatcttgggatactattggtagaaacaatctcatttattccagaactctttaacaaatttatggatttctcatccgacagggcatgaacgcacatcacaaagactttgccgcaactattattttttaatatatccacagccctgagtatagttcctccactagataccatatcatcaagaatcacaatatctcgattagtaactgaaatatttagtttttcatccatggtaatatttccagtgaatctatctctattttttcttaacccaaggaaagaagcattcataatttcagcaaactcttttgctctaggaactcctccaaggtctggtgatacaataataggttctgttaaattaaaattgttaatggcatattttgccagtaatggcatagaagaaatattaaaaatgtcataattgaaataagataatgccttagtactgtgtatatcaacagttatcagattacgagttccaaaatatccaaacagttttgctatcatagacatggtcacaaattctccttccagaaataccctatcctgcctagcataacccatgtaagggataaccggaataacttcagaagcgccagagtcgttacaatatgacaacatcatcaatgtctgtaaaaaatgcgaatctacagagggataagtagattgtacaacaatgcattttttatcaagtaaactcgcattaattgttattttactttctccatcagaaaaagtgcgtaattcgacttcaacaggatcaacatttaaacacgaagcaatagaattccccaattctatcgaagaaggtcccggcaatacgactacatctttcatgacatgattgaaatgatatgagaatcttaaaaatgttgaactattgataatatcatattaagtatgttcgaatttctacaatagttcaattggattgatataactgatatgtatatccgatttgatatcaatgttcacaagaatacacattggaaaaacatgataaaaaaatcaagatcgcggaacatccatactaggaatgtgattgaaaattatttaccactttaagttataaatatgtagagatcaatttgatacaattatgtatcagtataaaatcatactgtgcaatattatatctattgcttaataatcagcaagacatcagaatcaattttatctaactgttctctaatagcttgaactacttgttcgttcgcgtttaggctagaaaaatccaatagttgaaacccatcaaccaattgaacatttggagatagatcagaatttgaggaaaatttagaaataattgatgggagatctgcagacattttggttgaaaagccatgcatcagtttgccattatccaaagagaggcgcactctcccaaatttatctaatatcaatatagattgcattcttgttttaaagaataatttttttttctgataagtattcataaaaatataataatttcctagtttatgttccaaagtaatgtctccgtcattatgaaacaaggtttttgcaatctctactacttcctcttgttttaactctctagaaccgacattatttaagtctagagtaacattaccgataacagtgactctcaaaattgaacgatcgcttatatattccgattgaacagatagtgaatcaggagatgcattttttctaatagctaaatctttaatctccgttattaattgagtaacatcttctggagtaggattgttaatggttttctctttctcttcataaatcattcctgtggctacacctatggatgaaatgacatcggcgtaatctgcttttttgtattcaaaactgagtttcttagcaacaagtggtaccaaaacggaagcacctcctcctcccccgataaccactattctgctctttgataatttgtactcttttaccattggaattatataatccgatatctttgaaacagaaatatctagaacttgactagcaatttgctcaggcgacattcccatatagatagccaacttcgtaaatgcaatcctagctgaatccgcatttccatatgcattatcattttttgggatgagacctaatgcattagcggcacatgtgttggtgatcccgtatgcttttcctccaggaactttgatactaatatagtcattaggatcattgttcaatggactaataggtacaatttcaccctttatcaattcatcaggatcggcaaaacaagaataatctaatcctgcaatgtgtgaggatcgaggaccaacatcaataatttttctctttgatgaaagtctcaataaagaccccccagcaaccccacaaattcttacatcaagtgatcttatacaagttggatgttccattatgttcacataacgcatttcaggctttccatccttaattatactgatgttagttgaagtaccaccaacttctataaatatgccttctaaaacctgtaagaagagcaaagcgcctacaacacttgcagctggacctgaaagcactgttattattggcttgtgtaaaaaagaatccaatgtggttacaccaccatcacctttcattatcattacgggtacatttatgcctaagttattgactgcagatttaacataatttgcggtacttgtggcttttggaagaatgctagcattaattgtagctgtcaaagttctgatctctaatccataaattccagttaattcatgcccggcagtacaaggaagtttagaatgcttcattacaaataattcgttacttggatcatcgactccgaaagcctcacttacaactatggattgagctccctctgaaaccagattctctatggatttttcgatcccaggctcctctaaatatttagaggtatccaaaaaggtataacaggttctaagaaatttattagaatttagggatatatctttaatatgagttcttttcacgacatttgttttttccattcctacacccattccaataatgccaacttttgatacgtctccctcaagaaaggcgttgacagcttgggtggtactatgagaaattaactctatttctttatggtctatgtcgcacatctcaattaatgtggataaggcgttaacaataccgacagaaacaccgccttctaaagagtgtgttgttgaaacagatttttttcctagtatttttttttcaattacgtcaatagctacggctttggtaaaggtgccccctacatctattccgatcctaatttttttcaaaccttttgctcactcgctttcataaaaaccagaaaaacgtttgtttcatgcattccaagtaatttaaatgctaccatatcgaagagttacatttgtagtgagacatcaaatattatttctttgattcccatatatctaaggattgactgaaagttttttttatctgcagaaacaagaatttcgagcttgcctttggtattcttgttcttatccaagtctccagtatatttgagataattcttcacattttttgcaacttcagctgaagaattgatgaactttatagatggcaaaatagcttcaatataatttttaacaaatggtaaatgggtattacctaatgcaataacatcaatcgtgttatcaatatttgagtcaattatttctcggattttatcataggtaaatttctgatcaaataaaaatgatccactttcaactagattaataatctctgaagaatctaccttatccacaaatatctgttggggtatttctttttttatcaagtaattgaactctttgctatcaagcgtaccttttgatgccattattgctatgtgttttttcctactcaagtttattgtcttatcaagtggtagttttgttgaaatgatagttgtagaaaaattgttcttaatttcatcataaatttgaacagagggggtatttgatgccatcactattagttttggctgatatctctccaaaaatttgatggattttagtattattgactttaattcactcttagttttatttccatacggaaaattctttttatcagcaaaatacaaaatattctcagagggaataatcttcctcaattctctcacaacagatagcgaacccaatcctgaatcaaaaactgcaattggcctatatagcataattaacagtatctaataagaggtaaaaatgtttgaaatataattattttccaatacaacaattaccctcagggatatgatatccatgtggacaaatcttgggatgttttaacagggtacatagtgcatcggtaaaaatttctttcatatgatgctcaatgccacaaaccatctcttcatctacatcgatttttaaggcatctttcatgagtacttctaacagtcgagtgtttcgtatcattttttttccgatgttctcaccctcttttgtaagtgtcactatggaaccctttttataatcaattaaaagagaatcatttaacttatgaagcatttgaaccactgatggttgtgtaacatttaaaattttggctatagaactaacctttaactcttggccactttctgaaatagaccacattgccttcaaatacatttcaacatgctcggcttctgcggtgcctacatacaattgctctgggagtccagaatttttcgaataaacagtcaatgtatatgattacacgttatattttttaactttattgattcaaaagtaattgaaataaaaaagctaaaggtaagttcattcatttttaatagaacgtcatcagacttattgcgagatagaacaaggtaagtttcgttcgtttttcttaaattgtaaaaggacttgttttttgttcaatatcaattctactgactggattttacttttgtaaaagacaactttttttcctttttcatttatcacaattctatctatgaataaaaatccaagatccttaagtttttttatttttttgtatgtcgagctaataggtaggtcattatccttgcaaatttcaaaaacggttttggaatcttcgatggtagacattacaatcttgtaagaaaatccatcaaataattccttcaataaaattgaagcattcttatcttcttgattcagtaaatatcgctgatcagacaacatcatttaggctaccctaattgttaggataacctaatatttaaacggtgttatattattcaagtttaatctacaaaattttaatataattttttcaaattgtacatactatatgcacctatttcaaaaaaatggttaataattattgggatatttggatactttgaataagcagtattatactaaaatatattttaacccagtcatatctaaaccagtttagtttttgttattatataaaaaatgaagttgtttccaaattctagcattatagaaaatctaattccaaatagataaattaatacgaacaaaagcgtatagtaggttcttgctattttactacaatctcaccaaccatcgatgggtggtaaacacaataataatcaaaagtacccttattatcaaatttaaagctgaacgcttgttttgaaagtatagcgtccgaatcaaacaattgaccttcagtaggatcgctgtctgagccagaagtagcagtatgcgatatggtatctgcattataccatgtaattgtatcacctgagtttatagtaattggatttggtgcgtatgagttgtcaccgctgatgccattaattgttaccaggatagaaccttcaggtacaacaccagattgtgatgatggagattgagtttttggaattgtactttgtgaggtgggcaatattttgtacaaatcccctgtatagcttaggacatacatatacccgtcaggtcccacctggatatcggtaattccaccgaaaccttgtccaaacgtaattgggatactttcaacaggattgtccacttttttatcagctaacgcagctgcaccccctacattcgtgttatttataacaatatcatcgcgtgcttcatttaaagtaaatctatataaattaccattattaatgtcacctacaaacatatcattttcatattctttacccaacttatctgaattcaaaaattttagtgcagtcggacctataggaatatgccaagcaaatttgggttctgcatattttccgtttccaaaactcacaagatcatttggtgtcgccccgttacccaacagatcatcgttagagaatccttgaattaaggaccaaccactattaaagccaggaaaaaccaggttaatttcatcgcctgctgtaggaccattctctgtatcccataaattaccagtcataggatcaaaatcgataccgaagctatttctaatacccattgcatagtatacacctaaaggcaagtcagcaccaaagattggttcatcatcaactaatccaccatcttgagaaattctgagaacgccgcctaagccattaggtgctggaccatttccaatattttgtgcttgagtcctatgacctcctacttcccccattatcatatagacattattgtccggtccaattgttactttacctccattatgatcagttcgattaagattatttggaattgcagtcaaatccaaaaggaggacaggatctattaatttaccgtccacatattgataacgataaagtctatttcctaatgggtcgatattattggaaacatcactaccatcctcattatttccagattcagtgtaggacaagaaaacaaaaatttttccatccaagtgatttgaagcagcaatccccaataatccgcgttcgatttttgaggccacagatagatcaagtaagggattatcttgtacctgaccatccaatactctcataaccctcccagtatttttttcagtaaccaatatatcattatttcccacaaaagtcatgctagttggaaatgtcaaatcggaagtaactttttcaactgttaggctatcatcattgattgtaggtccatctggggagggctgagctttagagtaagctccataagaaaaataaacggaagaataatttgaagataatagtattaaaatgattgcgaaagaataaaacaacagtttaatgttatacacaagtcttatcaacagaaaaaataaaacacgaattaattaaaaggttacgtagtattgtttttaaagatattcaccaaaataagaaatttaatgtacccaagtagggtcttcatctaattattcagaaaaaaatccaggtttattttagaaattatgaataatgctaaataggaccattgaaaacctcttgtgagaactattgcagataatcgatctaaccttggaaattgatgaatctattcaagtttttccagactcaccaaaagtaaacattttacagtggtcaaatttcgacaatcacaaatatgcttcagaagtattgttttctagtacacatgtaggtacacatgtagatgctccgtatcactttcaaaagtacggcaacacggtagaaaaaattccacttaacagattgataattaacaaaaatatcaaggtattaaaaattgaaaaagaagatgacgaaaagatcgaagtagatgatctaagggaatacaacattatgaaaaatgataccatattgatcaacacgaattgggtattgaacagagctttggatacttatttcaataaaaaccctggactatcagaagcaggggcaaaatatctggcagaagccgagattaatttggtaggaattgatggtcccagtattgatcccgctatcgatcatgactttaattcgcatagaatttttagtgctaatgacattccaataatagaaaatctgacaaacctagatagactactgaataaaaaatttacttttgtggcattaccgttaaaattaaagaactgttctgggtcacccgtaagagcacttgccataatggcttaaaagaatcacaaaagtatttgacagtaaagaaagatttgaaatcaatcgaattaattccataaaatcgttatcgattatgataagatgttgaataataccataaagctcaaggatgtaaaatgaatgagagaatgagagaatgagagaatgagagaaaccttagttctatgtgactagtatgtatttaaagtcgacacataaaattcctctagcgctaatagttaaatcacaaaccctgatccattgaacccaggtcaacaacacaattttattttaaaagaacattcggggtcaccttgtttttgcaatggtatgatacaaatttgcttttcaatggtcaagtatcaaaatcatgacaactgaaataggaaataggaaataggaaatcatttgtatagatcttaacaaatgttttttctattcttggattttgtattactgattaggccaactagtctataaccatattcaaaattatgtttaacatgattaattccatgggtcaaatgtgtttcgaatttaccatccaaaatgttttctatataaaactggacctttttgattgaaatctgtgaatgtcgaatttgtttatcagataaggaacgaccaagttcggattcgatttctgttttaaaatcttttaattcaatgagcttatcatatcgaagaattttattataattattacaaatgtcatgtaacttttgtagttctttctcaggcaatacagataaagattttttgacttgatcaggatctctttgaacaatttgtgccaatcttaataccatttcatctgtcatgtaatcagtgtttactaattcagaagcataggatggagaattgtctcgtttaacatctgtatatgtatttttcatagtcgaaggcatcctaacagtatctacactatcaatcggttcttttgaatttttgatagatttttctggcaaaaattttagttcttttgacggataagaataagcatgctctagcaaagatgactttttggactcatagtaagtctttaactgaaaaagagatacctttttgccatctaaatctgacttgaaaaatattatacaaaggacatccacaagtaagttaggaaactgaattttcatatttttgtcaaaagtatcataggtatgaaggaagtcattacaaatttcaaagacaacattgtcgaaagtagacaaagtaaatggaatagaattgacctgtttttttatcaaatgatctatcaaaaacttgtatgacataataaaaaaatcgtatacatcgctcttttgtaatacaaaggtatttttctgtatgataaaagtaatcgtcttcaacaaaatcatatatggatttacaaccttaatatctggaaataaagtgtgaaaatccttcattatagtagtcatatagtcatcatcactttctaaattatcaagccaattaatcccaagttctttataacttttcttaaacagaacattgaaatcaatatttgagtcactatccatttttagacatgatatatggtatttttttgttattaaacattagaaaataatttaggtgaagaaaattatattaaaatgttatctaaatagatactctagttatttttttttgggtcatcgtcagaagctccgtcagaagctccgtcagaattatctatagcccagggaaaccatttaccaattattttggcccaatcaaatttaaatgtaaaatataataccaaagctaatagtagtatagttaatatagaaatcaaaatagtcgaatattcattattataatccgttacaacaaggaatctttccattattggtctgcccaataatacggttccccatacaattattgcccctagaataaacttgcctgcgaatgtaaatatcgcgaatttaggtaggctgtatttggcaatcccgagggggatatataccagatcgtctggtataggagttaaagctgccacaaaaactcctatgccaccatatttgcctaatagtttttgaagaggaagcatcctggtttttgtctttttacttaggatgttcctaccataatagcttgcggtaaagattattgttttggccagaactgccccaatagtactcactaaaacaattaggttggggtccagacttttatctaaggctgaagtgactaagatgggaaaatatgggactggaatgaatggaataatactacctataaagctgattaaaaatataccaatgtaacctgaactgctataaacagaataaaggtccggtatatcaatcaaacaagagaatattaaattaccaaatataactactttatcaattttattaattttttataataaatatagtaaatattagaagtctttatccccccttttgttccttcttatctttttcggccacggactttctcatcgaggctatcttttgttgtcgtctaggttgaataaatagaatatagagagacccacccagatatattgcaagtaagatgagttgagccaccacggtttctactgttgggtggatcccagtcatcgttgcaacattaatatctaatcgaggtactatgttatatataggagtagtagaaatccatccaagttcctgaaattcacgtactgcattacctaagaaggttattgacataaaagctccaactgccatagtaagtccaaacaaaactcttaatggtaatttccttcccagttttcgaattatgaagacaactgcaattattacagctagacccaatactaaccctgcaagtacgtatatctccatatattttgcaaaagaaaatagagcttgataaaacaagactgtttcaaagccttccctatacacagtaaagaaagccaacaaaataaataccataaaactacctgtagtcgttgcttgccagactttagctttaacaaattcaatccatttcttagtttcaatcttgtttagaacccagaagctgacccagaatagcacagctactgcggcgatgccagcaatagcctcaataagttctctttgtgccccagatatttctattataaattgagcaataacccatgttacagcagtcagtgctatagcaagtacaattccagcgtatacatgctttttgaacttttcatttcgagatgcctccaagtatgtcaaaatggcaccaagtatcaaggcagcttccaaaccttctctaaaaataattgaaaatgatgaagaaaatgcaatagcaggtgcaactaccccgatacctgaaacaaaccgttcggattcatctaatccacttttaaggtctgcaatcttggaaacgacctcattagatggagcatttgatgaaatgaggttgcgtaattcagcaaattttatttccatttcgagagtaaaatctggatcaattggtcttaatggtatttcaatattttcataactgtcaagatatgcagatctagcggttgctagtgcttgagaagtatcattttgattgtagatagctattacctcatccagtttaagtctgattgtatctatatcgttacgaacctgacccttgaaatcttccgaggcttcgcccatagaacgcctctctcccgtgtaaactccaaacccttgttttagagaatcaatattggcagtattcgtaacaaaagaagaggacaaggtaaaattattgtttgactgtgctgcattgggggtacttagcaattgtttggaaacttgcagatcagctttaatgctagaaatgtaagattcaatgtcagcaagtgaggtttgatttttgattaaagcacgcagattttctctcatatttgtttctatttgcaacattaaggtggaatttacctcctcgattggggcttcaaggtattcaaaattatctaaatacgcagaggatacatttttgtctgcagcaagataattaccattttgaatggaggaaattgcattatttagtagaatatctatgttatcataatatgcctggagggatggatcaacggtgctagatgtacttggcatacgaatattattagattcattcagatcattctctattgcagagactattcttgaaaactctggtgtattatcgcttttggaatctattattgtattcaaatttgtgataaaatattctatctcattagattttgcatcggtcatatttggttttaatatttcaaaaattatatttgattgattcatcaatcctcttgtattctcataatctatcatggcaaattttgcaacatcagcgtcggcaatttttgaagtgttcaaatataacccatatgaatttgaagcatctcttagtagatatgacatggtttgagattcaagaattgaaaaatcttgtgcaggaagtgtatctttcaattttgaataaaaatcattgattatgtttttagagtcggttatgtcagcaagaataacaggagaatttggatcagcacgagattgtattccgacttcagtaaggttagattccaaattattagccaattcttcatcaactgcaatcgcaataggtttagtcgatggataaattacagagtgaggaatataagcgtgctcgaataaaagagaattgttattattatttattttatttaataggatatcaagttgcgtatctattctatttaaattaatattcaaaagcaatagatcctcgtttgatactgtaggattttcaatagaagtagaattttgagctagaacattatttacagatgaaattgatatatttgcgatcaacaatagtaggataaaagttgcaagtagttttaccacattcttttacctcgaatacaagcactaaaaattagacatggcgttaatactaatgacattaggcctccctaattttgttagatatgcaatttaaacattctttgataaatttgctatgtttgacataacatgattaaaagtattacaattatatggcaaaattatctattaattatataaaaatattatcataaattaaatataatagtacatagttgtcgaaaaataaaaaaaattgttaaatcaaagggttaatgcgacgtctgacgataacgtatttgatagtgtttcagtcttattcaaatcagttagagtgacatttgtttttacatttgttagagaagggtcagcaaatgaagtagcaaattggataatcccaccatcagttattgtaaagccgtttggataggaagaagtctttattagagttccattagctgcaaacacctccatttttccgttaatggtggaatccactaacgaaagatccttggtttgatagtcaaccaaaagttttacttgattaagggatggatttgaagttaaaggtccgaaagtagcattatttagacctatagtaattttttctaatgattgtgcgtttatgccattaaatgaataggcaccaaaaagtaacaaagtagcagcaaatagagttgcagaaagcagcacaatacttttgtgatttgctaatgaattagacatcagtttaaaatttaatataatactataaaaacaatatgttaagatataattatacattttagtaaaataatttataagaaatttattaaaaaaaacaaaattggattttatgaagataaaaaatcaaaaagtgagatcatttattttcataagccacctcctggtgatacgaaatatccaggcccaagtcctcttcttcttccttagctctaatccctattgtatagtctagaatctttaagattacaaatgttccaacaaatcccattagagcaccaactccaacccctaaagcctggattggtaactgcattggatttccatatagccaaccgtttggaccaattggattaattgcctgcgtcgcaaataggcctatccataagctgccaattattccagtaattccgtgaacagagcttacatccaaaacatcatcaatctttaatctctcctttatcagtacaattccgtaataggatgccaagcccaatactatacctaaaacgaatgcccattgacctgtaatgaaaccagctgttggagttattccagccaacccagaaattgcaccatttattgctgcgctaacggtaggctttccagtcctcttccaacttagtaggatccaaacaagtgcacaagtacatgctcctatttgtgtggcaagcagggcacttgcagcaagggctcctgatgctagagcactaccggcgttgaaaccaaaccaccctagccacagaagagtagctcctatagccgcaagtggaagattatgaggcaccataatttctggaccaaatccttttcgtctacccaagaccaaagccgacgctagcgccgccatacccgcacttgtatggataacgatacctcctgcaaaatcaaagacgcctatctttgccagccaaccgccaccccatatccaatgggcgagtgggtagtaaattacaaggctccatactattatgaaaatgaaaaaagcgttccatttcatacgttctgcaaaagcgccagtaatcagtagaggagtaatgactgcgaacatcatttgataggtagcaaagttaactccaggtattgtgggggcccaaacaaccgaatcgttatatggtacattgttaaagaaaaaccactgaaggtcccctataattccattaacgtccggtgcaaacaccaacgtgaagcctactatgaaccaaagggttgatagtaacgccattcccgtcatagtttgcataataacggacaaagaattttttaatctgattaaccctgcttcaaaaaaacccagagcaggagtcatcaaaaatactaatcctgtggagattaacatccacgtcgtatcaccagtatctattgccaacggtcacaaaaggtttatagtagattataaagtttttccttttttgcttaaaaatttcaatcaaaatggatagattaataaaattatcataaaattttgattttttgattaacagattttaaaacatacaatatttaaggtttataattttgattccttcgaatgtgtagaaaattatgctgatttattctacatagtgattggttgccaaagtagaagttagaattaaggaaaaaatattgcaattgtagtaactccatttcagtcacttaggataatgaaaaattaatcggagaacagtacctgattttaagtatctcgatctaataaaaaaaatgataaattatctttctttttgtttacctattggaatttaagaaattttcccaaaaattcttgaattccagtttctttgtttcaaagcttcccttatctgttaattgagattgaggttcaaagcttcccttatctgtcaattgagattgagtggtattagctgtggaattttcagacaaacctgtatgacaggattgaccattgttacaggtagtcacaacacaggtatcgtttctacaatttttttcgtaatatgtagaactactactactgctattaagcgaatatccataaggaacttgaactacggaaaacccgataactaatattagcataaaaataagataggcgttcattaacaaaaattactgttcatcgcatttttaaattttgatgcaatctaaaagatgattacttactaaatatcaacaataagaaatcaaaaaaaatattatagataaaatatcactgaaataaaatatgaaagctcttttctttaataagccaggcattgaaaatttgatctttggtgattaccaattaccagatatgagagaaaatgaagtcttggtagaaactaagtgtattagtgtcaaccccattgactattatactataaccggaatacacggagtaaacggcccagcaatgaaaataaatccgtatcctcatatagccggctctgaaatatcggggattgtaaaaagcaaaggcgagagagtaaataatacaattaaagaaggtgatcgagttataatatataatagaatatttgacggaatttgtaaatattgtataaataatcatcaaatgctttgtgaaaatgccggaatggtaggtatttcaagaaacggcggatttgcagaatatattacagttcctcaacaaaatatcgtaaaaattcccgacgaactagattgggaactggcctctagtttgccaatagctggcttgactgctttcaatgcaatacaagaatcaacactcaaatcaagagataatcttgtgatatttggtggttctggcaataccggccttttttgttcccaatttggtaagattcttgatgcggtaacaatatcactttctactaaaccatggattaaggaatatggcgtagactacgttttaccaattgacgagaacctcagagaaaaaatatcagagattactaatggagccatggctgatgttgtcataaattcacttggagaaaagacgtgggccaaaggtatggagatagttggaaaactaggaaaaataattacatttggtgtacttactggcggtaacttattcatagatggcagactattgtataacaaacaaattacaattaaaggtactactggaggatctgttgaaggtttactaaaccttgtagagatggcaaaagggcaagacattagaaccagaatttggaaaagatattctcttgaggattcaagaatggcgatagaaaaggtttttgacaaaaacaaagaaggtagaatcattattgaaaactaacggattttagttatgaatcttcactagtaatatagtatttaatgaatattatacaaagtaatatcatattacataattgaaatcataatgatacattctaaattactaactaaggtattacttttataataagaaaaattattgatagtatatgaataatctaggcaagttatccgttgtaatgatagctattttcgtagcaggtaattccatatatccagttagtcagctggtaaacgcacaattggatattttagagacacctacaaatccaaataacacctcaacaacaacaacaacgacagcaactgcaaaagccgtggacactgataaaaatgcaaagataaaagaagcattagctaacatatttgaaatatatcaagctctcgcaggaaagggtgatgtagatactttgctaaagctaaataccatagagaggatattgatagagttatcgagataacataatataataactttaatttttttttgttttaatttaataataatttttcggatttatataagtaattaaaaaaaagggtggtttatgttgttgtggtgttttgacctgttgttgtggtgttttcaccgttccatgctaatggagtaccaagcatgtatggttttacattcactggaatgctgtttgcaccagttggtggaattgcatttgatgggtttgcatcatcagtcaggcctaataagttgcttgtaccattgtctggaccatcaactacgattaatcctgcttgacctttgaacaattgtgagtagtcatggtttacaaaggcgtaaactcctggttggtcaaatactacatcaacaattgcatcattagatccacctaatgtgtatgtttgtttaccaattccgctaactatgctaccatcagtgactctgtcaagtatttcacctacaatgtggaagttggtcggaaggtcaccgtgattaagtaagaagaatcttacgtggtcgccttgtttaaagaacaatgttgttgcatttggtgtcttggtaattactggatcatatccaaatgggataccatttatccatgaagcagttggagcatgagcgaacattgctgcggaatcatattggcccgatgggtctagatagtattctgagaattggaatgcaacttctttagcatctggagatacgtctgctgttgttagtgcattagtaccgttctctatagctacaccctcataacctgtataaccatctactggatcaacaatcacaataccaaccattccttggaagacgtgttggtccattgtcaaaacagcatttccttcacagtgatatttgaatactcctggttgacttgcaacaaaggtatattgctttgaatcgcttacattaattggaccaaagtttggaactgcacttattgtggatgcatgatgatccaagctgtgaatcaatgtattatttggatggttaatgatattaacattcaaaatatcaccttgagttaatcgaatagttggtcctgggatagtaccattccatgttaatgcggctacactttgaccacttggtaatgtgagatttttctcaatagcaacaaatgttacatttttcactggtgcttcactttcagatgcctcttcagtagagatcggtgtgaaagctccgcccataactaaattcatattggctaatgttaattgactttgttcacttgatattgcaagtgatttcatgtttatgccaggaagtaaaattaatccggacattagaacagctgacaaagcaaaaattgctagtttactcttcattgagctaaattagatagaagatatttttaaaccttttggacataagaattatatagaaaaatgtatcatttccaaaatttttataaatattttcaactattgtaaataattcaaaatatccctcaaagaaataaaatattgaacagttattaaacatatcaaatattttttatattttatagattaatttgaataaacttaggtatttctgggagatatatgtcaatttagtgtataaatgatagtcgatcaaggataatttcccatataaaaggagataaccagttcattcgatttatttcagatgctagagttttcaataataattaataaaatgtggataattttgtctatgaatgaggtttgaattaacttctcacagggaagggcattatctaaaatatgacgaatatttcataatcaatttcgcatttaagttataattgaacaaatttctactcaattgtgacataaatagctatagacagtatacgtaggttatccaagatgtgacgatgtaaagactccgtcagttccaaaaaaattgccaccttatagaacagtatattatgaccttctcagagaatatgaagccaggttttggataccacacatatgcaccgggaaagacgtatcaaaataagttgaatttagcaaaataatgcgattttacatcttttagtctattggatctttattttctttaaccttttcctctaaataatccggcaactgcataattggaatattcaaatattcagcaatagagcatacttggtatatttgaaatagaaattcttttggatcaatttcttccttaaaacagtgtatagccatattttcaagaaatgagtccgcttgtatttcggttaatttcagaccatttagtctattctttagccttattgatgaagcgaatcgagtcagatcaagattgtcctttttcaacaaaactgcaacagtcctcagcaggtccatatcttttatgctttctcttttagcttggacaataatgtttgagacgctaccatagcttatttcaagttcatctgcaataatattacgaggcttggcctcaagccatgcacttattactcttttcttgatagcggatggaaccttttgacccatttgtaatactaatctataaatattcacatataattaaagaactccattacagcacgaaatacgataagagcaaaatcagggtatttgaccatcatttgaccatcatttgaccatcatttgaccatcatttgaccatcatttgaccatcatttgaccatcatttgaccatcatttgaccatcatttgaccatcatttcaaggaataagaaataaagtcaagaattatttattcacaactcagagactagtgacactaataaccaacgattgtacgttgtatttttaagataatttattttttaataaatacttgtgaatcaaagacccgtattggatagctttcttaggatgcatggctgcttcttttggaacacctattctcattgcaacctctcgcaaaatatgctttcttaacaaatcatcttggccctttattttatattccaaagggatagtttttgcatattcaataaatgctcttgatagaaatggttggtatgatctaatattcagttctgctatcacattggaaatttctctcatcatgtgatcttcattggctaatttttcttccatgtaagtggttactgagtcttcaccattttgatagtatgatctgtatcgatcatagccacaaaataactcatcaaaaccattggcggtaaggaaagaatctcctaattcatgatgttttatgatcttactaatctgataaaaagcaatacagttttcaatgtgtgaaagaatgttacaagatatttttgattttacagacttaatgtcatctaggatgtctccctccttaatttcataagctatatgattcatagacaaagagagagaattggaaatagatttagaaaatacaaggtcatgggaattggcaaaaccaattgttactaggtagacttgtttatccagatctttacaaatttttgccaataaagaactatcaacccctccagaaaatgcaattacaatcttatcagaattttttatgaacttttctaccgtagaatacaaatatttggttaattcgtcggatatcagcacttttacgtttgggttacctttgaatatatttgtaataattataatagagagaaaataaataaaaatagatttggataaagatctgaaatacataggtcaaagcaaaaacttaatcaagaatagaacaggctattcaatctcaaaactattggactttctagaaatacgatataattacgataatgttttaaatgattcaaaattaagtatagattttaaaattggagataagttcattaaaataattgaaaacgataccgacatgaatgaattcaaaatcattcaagagaaattcccatttgtagatatgattgcgataggaagatcatcttacctaggcaaaataaatgagatgcagaacatcttcctgtttgacaaagaaagtaaacaagttggttccatatttatcgaagacccatcattatcctttgattatgctcacattttaccgctggtcgaaaagtgttcaataattcacggtcatacatctactgtcatggtagaaatcatcggggaaatgaagaataacctagtgatcgacttctcagaggctaaaaaattaataaaagaagctttatatcaaatcgatcataaattttttattaatagaaaatatctaaagaaggaagataaagatcacttttttattgaatttgatggtccaaaaggatattttgatttaaaagttccaaaatatacaacttatcttttagaaggcgaggcgactgtggaaaatctttccacagaaataataagaatgctagcagataaaatgcctcagaatgtgcaagcacttggtgtatatatatacgagggagtcaataaaggcgctcatattctttcttatattcggtaaacctaatattgaataaaattctgacactttcatttcaatagaactatattctaaaattattcaagattcaaactacgtctaaaattctatttagaagggtacagaactttcattaagacatctaggaaggttaataactaattaataaatgagtattacaaattaaagattgagttcaaagattacagaaaagatatggtcgccagatattgagagaaagatcatagaagaatggaaagctaataatgtttatgacaacgttgaaactaatcagagtaaagatgaatattttgtaatagatacaccccctccctatccatcaggaagaccgtggcatattggtgcagctgctcactattcgcaaattgatatgatatcaagagttgcccgcttaaagggctttaaagttatttttccgattggcgtggatcgtaatggcattcctgtggaaattcatacagaaaaaaaatacaagatcagaatgagaaatacagaaaggaaagaatttttgaagttatgtaagctaactcttgacgatactgaaagtgaatttatagaaattctccaaagcctgggtttaagtgcgaattttaaacagaaataccagactgattctccggatttcagagcttttactcaatcaacattcattgaaatgtggaacaagggattagtatatcttggaaatagaccaaacaactactgcattgattgtggtaccacaatagcagatgcagaaatcatatatgaagatattgagacgaaattagtttacataaaatttttcttagagaatagtaatgaattcatcgttattgccactaccagaccagaactcctatttgcatgtcaagtggtaattgtgaatccagatgatgagagatatatagaaatgcaagaaaagactttgagaattccgatctttaatagagaagtgaaagtaagaccacatcactctgctaacaaagactttggatctggagcagttatgatttgtagttatggtgacctaaaggatgttcaattattcagagaattgggtctgatggaaattagatctatcgatatgaatggaaaaacaacagaatttgcagggatgttttccaatttacgtataaaggaagcaagaagtaaaataatagacgagctagaaaagcaaggattagtagaaaaaattgaaattatttcccatagaactcccctttgtgaaagaagtaaaacccagattgaaattatttctttggaagattattatctaaaacaagttgattttaagtcgaatttgttagaacaatccaaagatataagattttatccagaaatgcatagacaaatcctattaaattggataaattcaattgccatagactggcctatctcgagaagaagattttatggaactgaaattccgatatggtattgtacaaaatgtaaaaaaccaaaccttcctgaacctggaaaatattatagaccctgggatgaaaccccaccatttgatagatgcatatcgtgtaataatgacaagtttgaaggagagaagaagatttttgacacatggatggattcgagcataacccctctttatattacgaaattttacaaaaatagagaaactttcaataaaatttaccctgtctccattagacctcaaggaaaagacattgtaagaacgtggctttactatactcttttaagatgcttgtaccttacgaaccaaattccatggcagagtgcgtggataatggggtatggagttgatgaaaaaggggagaaaatgagtaaaagtaaaggaaacgtaattgaccctctccctataattaaaaaatatggtgccgatgcttttaggttttggtctgcaagtgagacaaatgttgggtatgattttagatgctctgagcaaaaaatccaaagtgcacaaaaattcttatcaaaattgtggaatattggaagattcatctctaattttgagacaattgatgaaaacaataaacctcaagagctaaaaacgactgataaatggattttatcagaacttgcaagcatgaccaaaaaatgtcttgaaggttatgaagaattgaatttttttatccccgctaatgcattgagagaatttacatggaatatttttgccgcccattatattgaaatgataaaaagtagagcatacaacgatgaatcagaagaagaaaggaaatcagctctatatacaattcataaatgttttagaaccatattacttttgttagaaccgatttctccattcattacatacgagctgtggaagaaaatctatgaggacggagagatggtttcagagcaaaaaaaaattccctctgtggagaaagaatatgatgcatttatttcatccacacaacacattatcaaattcaattcagaaatatggaataagaaaaaggaaaccatttctagtgttacaaataagccgctttccttaaaagaccctataaaaacacagatacccagcgaactagagttatttaaggatgatttgataatgatgcacaatattatagtagagtaagaaatttctaaaaaagaaggtaaataggctattgagtgttaagccttatttccactaactatatccagaatatcttctgccaaatcaattacgttttgagactctaggttaggctctaaagtaatcaacaacattttcttgtctaaataaaacgttagcaatgataacttctcacgttctacatatacaaaacgagctctacccatagtatcgtcaaacctttctctcatagactttctaagggcagtatgagtcaaatacaattcttcgcttggttgatcaacaatagaatcaattccgtgacgcattccaccaactatcaaagagccggtttcatctattaatccagcatagcggataccctcatttagctcaaaaatagtatcaattattttttggtagtccataaataaatagaatagtcactatttattgaatgttaagattatcttcatgtttatttcaatataatccaaaaaacatttttattcgaatgtatagaaatagtaaaaactttgtaattatgaagatcttattataagtaaatcttcttaatcgtattaacctataacgtataaacgacataactttttaataatttttttgttaattaacatatgaggaacaaaagtatagaagaaaggtatagaagagaaacagaggcaagaaaagaagcactaatttgcagctatttccctcacactaaggttctttatatcgacgtttgaagttccgtcccatcggaatgtagctgccggacctccccatgaaatcaattcatctggacttcccccacatctatcaccgtcttcaccgaatccgccgctatccgtataaccaaacactttcttccattgaccattattgttttcgtcgacccagttttcgagttttacagcaggctcaccatttacgacagtgttatacatgatagctttgtaccctatccatttatcttcgatagaatctatgtttttctgggcaggtgtaaatgagtaacctcctgaatgccattgttctttagcaaaacgagaacgtccatctttgaacaagcctcctttgtaagcggttccttcacagggttcatccgagttatgatgaccaccacgagaataccatgttaaatcaaagtcagaatccgaagccgaatttatcttaacatatccggtcatttctatattcctccaatcttttatgtcttgcatgtatccctgggctgacagttctttttgatcatatgttttaatagcatcttggtgatatccggaattagtcattacattcatcctaaccttatcagatgttaccttatatgatccatcagcatttttcttcaaggtcagtttgggatcaaacctattgtcagaagacgggttattcatattcatgaaccatttttcaccgtttggtttgtcaggataaattttttttatgccaaacacatctgtttggttacctgtgccggggtctgtttggttacctgtacctgggtctgtacctgggtctggacctgggtctggaccgggaccgggaccgggatcagttgatgaaggtttagagaatgctcggatctcagaaatagaagcccaatcattttctgtattaccatttacagtaactcgaatgtactttgctgtcaaattagagtcttgaatcaaataacgttcatgtgagttggtttgcccactgcttttgccttcaaatagaggagtaaaggtagtaccatcctgagaggtggacaagatgaaattgtttatccttacatcacctcgatgccatgcaatatctacagcacaaagtatatcgtttttctcaagctcagtttgaatataagagcctgacccgtagtttgaccatcgagtgttaaagttattgtcaagtacgttttggggtctgttaccatcatcaccactggcacctattctagtaactttatcttgaatacatcctgcaggcaattgacctgggttggtgtctggaccgggaccgggaccgggaccgggaccgggaccgggaccgggatcagttgatgaaggtttagagaatgctcggatctcagaaatagaagcccaatcattttctgtattaccatttacagtaactcgaacgtacttagcatgcaagttgggatcattaactacatatggttcatatgaattagtatcaccgctggacctgccagaaaagagaggagtaaaggtagtaccatcctcagaggttgaaatcataaagttgtttatccttacatcacctcgatgccatgcaatatctacagcacaaagtatatcgtttttctcaagctcgatttgaatatatgagcctgacccgtagtttgaccatcgagtgttaaagttattgtcaagtacgttttggggtacagtattaccatcataaccactggcacctattctagtaactttatcttgaatacatcctgcaggcaattgttgagcaggactaggagctggtgcgggagctggtgcgggagctggtgcgggagctggtgcgggagctggtgcgggagctggtgcgggggcaggagatggttcaggataggggtttggccaaggccaagaatttccaccgcttcccggtgaaggcattccgtctagatacccacctattatatcattgatgttcacactagcatatgcattgactacaaggttggataatccaggtgtagaaagaattaaagttaacgctagaaaaacatataaaaagttattatattttttcatttatacacttacctccatttaaaattgtatttctttgtaaattcaaatcaatttcgataagtaatagtgcagtatttatgctcattctaagaaattaagaggatgtcatatttatgagacgcttgtttttgttatcaaagaaaaataaagtaattagttatgaaagcatgatgatcaaaaattcttatttaaattataccatcattattttactactttttaagacataagaagagaatgttatataaaattatatgaatttttattacaaattaaaacatatttcataaatattaacaaccgtaatataaattagaattgtttcaatatattaagattaaaaatgtagcaatcataagtgtatttattgtctttattattagttcttcgacatcgtttggtttaaataataagatttttgctgcccccattgacctgcctaaagtcagtctgaaccataatggaggcataaccgatctcagcccaacattaactgtgaaagataaaataacgaccaaagtcggtcaaccagaggacacggagactattgaatataaatcgttaatatatgctataaacaggggagatcagatatcgtttaactttgaagaggagccctctcaagttgatgcttttctgatagattacgaaacagattatagcactttgtgggccttagaaaaaacgccaaccggagagtatattgcaaatactccctcacctggtctttacaatctcgatgtacatgctatatatccagacggcgaatacgtatcatactctaagttactcaacgttgtagataataatctcaatcttctaagtctaactcctcaaaataatcaatgtggtaacgaggtaacacttgataagttaactgcaagtggcaatccagctacaagcattttgaatcaagtaattaatcagccattaattaaagagctgtcatttgggattatcgatgaattgaacgtccaattaaatgatgttaaaaacatttgtggaattcaattagggcttaaaaattcacaaaataatatcaatttctttgcagtacaaagttcaacagacggatcacaatattctgatccaatagtttttgcaaacacaggattcagcggtgagttaccagaaatgtacatatacccatcttcagttgaagccaaatacttaaaattaattcctcttggaggtacattggaaaaaggcttaggaattactgactttaagttatttggtcagtaatgcctaaggcaatggtttaaaacataaaaaataataagcttattttgaatttttatgtttgaatttgaacaataaaatcaatttctactggagaatttaacggtaaactatttactcctacagctactctggagtgccggcctagatctccaaatatctcaataaggaaatctgaagctccgttaatgacttttggatgatccgtgaaagcatcatcacaattaacgtaacctgttattttgactattctttttactttatccaagtcaccaataaggctcttaataatagagaaggcgtttaaacaacaaattttacaagatagttgagcattctcgattgaaacttgtttgcccactttacctctaaatttcaggtcatttgatgaagaagttatgtcaattggaagttgacctgaaataaaaagtagatcgttgacgtttactatcgggacgtatgaacctaatgcttttggttttccaattggaataacaagattcaaagactctatttttttttctggtgtcatgtttgaatattccataattagaattaaaaggttaacttttgtattcagtaacctttttaatatctttgacttttgttgtaattatgtcaaaggagggtgaccttccaaaacttccaatcaaaaacaggaaaataggtactataggtatctctgttattgtgataggtttatcattgttatttatatacatattgtgggcatcctttgggtatattggaccttcgttctcatccgatgttttaaatttgcaacaatcaactttaagagctctatatcacttaccagaagaaccagtaattacaaatcctacagtactacaaatcccaccctcacttcgccagtttttgacagacaatgcaaccagtggttcaaccaatgcaactagtggttcaaccaatgcaactagtggttcaaccaatgcaactagtggttcaaccaatgcaactagtggttcaaccaatgcaactagtggttcaaccaatgcaactagtggttcaaccaatgcaactagtggttcaaccaatgcaactagtggttcaaccaatgcaactagtcaagcttcaaataatgctcaagtatcaatagttccaggagcatccactttgactgatacggcattcagtccaaattctatcgaagtcactgttggtcaaactgtagtgtggacaaacgatgattccgcattccatacagtaacatctggaactgctggtgcaacagacgctggtaaggaatttgattcgggtctaactggtccaacagcactaactagtaaggggaaaacctttgagcatacgttcgatagaattggtgattatccttatttttgtaccttacatccagcaatggttggcactgtgatagtgaagtaaaaaacaaaaaggcattttaatttgtctgtcttcgttgatgaaattaaagacgtagacgtatccattagatttgtttagtgttcatagtgggtttaaataatcatctttactccaaatgcagataaagaacaacaaagataatagccaccggaacagagacctcaacatgaaattgaaaaggagcaaaagaaaagaacatagttgaacacaaaattctagtcttatgtttcccgctaatctgtggctaaagatttacccattttgtctaattgagatattttcagaagtgtataaaaaaagggatgatcagtacataataaatataatcatgcatcttcagagacatggataatcgttttgacaatgcaaaacccaattcgttgatcaaagaaaatagtccctatctattacaacacgcttataatccagttaactggttggcatggaatgacgattccatcaatttggcaaaaaaagaggacaaaccgatctttctcagcataggatacagttcatgtcattggtgtcatgtaatggcacacgagtcatttgaagataccgaagttgcaaaaaccatgaatgaaaaattcattaatataaaggtcgatagagaggaaagaccagatatagatgacatatatcaaagagcatgtcaactagtaaatggtaatgggggttggccattatcggtatttttgactcctgacctcaagccattttatgtcggtacatattttccaaaggatagcagatatggtatgcccggttttaccgagattttgaatcaactttctcaggcctatacccataagaaaagcgacataaataagaccacctcagaatttgtaggagcgctgataaacacatcaaaagatattttgatcaacaaaactgtagaaattgacaagacagttctagacgaatctgcattaaatttattgcaaatggcagactttattcatggaggttttggaatcgcccctaaatttcctaatgtatctaacttattatttttgcttcgttactatgatatatcaaatattgaaaaattccaagactttgtaactttaacaagtgaaaaaatgatcttcggagggatacacgatcatctgggaggcgggttctcgagatattcgaccgatcaaaaatggttagtaccccattttgaaaaaatgttgtatgataatgcattattggttattttgttttctgaattgtatcaaatcaccaaggaaaaaatatttagagatactgttgagaaaactttggattacattttacgggtgcttacaaataaggaaggaattttcttttcagctgaagatgcagattctgacggagaagagggaaaattttatgtatggtctaaaagagaggtcacctcaatcattcaaaaccctttacaccaaaatatcttctgcgaatactttgatataacagaagtagggaattttgaagggaataacatactaaatatcaaaacctccgacgaacatctagcaagaaagtatggactagatgtgaaagaggttaaaaacatcatagctgtaaattctacaaagctttttgatatcagggagaaaaggataaagcctcaaaaagatgataaaacaattttatcatggaatgcgctatccatatctgcttttatcaaaggttataagataacgggtaaagaagaatatataagaactgctctaaccgcagtggacgtcatcgaaacaaagttaaaatccaaggaaggctatttatatagaatttataaacaagataaggccaaaatacttgcttatttggatgattatgctttttacataaattctcttttggatctacttgaggtaaagacagatccaaggttcatcgaactagcatcttattatacagatgttttgataaagcatttttgggacgaacaagaaaataatttctattactcttccgacctgcatgaatcgattctcaccagaaccaaagtcttgtatgatttggctttaccaagtggaaattcggtttcaatatcaaatttgatccgtctttatcacataacagggaaaaacaattatttagagatggctgagaaaatgatgaaaggatccatatcatccgcactggataatccatttggttttggctggttattatcatcgacatacctatatgttaagaaaccaaccgaaattacaattttttcaaaagatgataaatcggatatgattgataaaatgaataagttgtatattccaaatggtattttttctattttacacgaggacagcctgtcagaaacgctagatcagtacaatttattcaaaaataagacattaattaaagaaaaacctgctagcgattttgcaataatatgcaaagactttacttgttcgcctccattgacagatttgaaaaaaataatggatattttgtcttcaaatacatcaaaggaaagaattaaataattttttttatgattgtatcacagtgtcaattcttccgcaattcagatttttttttgtcattggattaattattttgggtatgggatcagtttctaatatggatgtttttggtcaaatggaacaaacatccaataattttgataaggcgaagtcatctagtgatgaggcgatttctttaattgattctttgaaaggatcatcattacttgactcggtagttgaaggtatgcaaaatttttctttcccgatagcaaaccaatcagataataacgataatgacaattacactgagatctcgcaaacattagacaatgccttaaattatcttggaccgaataatactacatcaaatattacaactggttctccggataaaaataatattaccattttatataacagtaacaatctaaccaatgatgatattactagcaataataacggtaataataacatagaaaacatgcaatctatgatgatactgccctatcctatgacgatttcttcaaaggattacattccgctatatagttcaatgccattgaaaattttgaatggaaacattctcgcaaaacttccgtgtaattcaactaatccattattgcaaatcgtaggtacatctgccgataataatgtgtttcccattcagatgaatctagtttctaacttttcaaaattagggagtatgtgtatgtaccaatcactaattcccaatgatttatccaatcttttatattcacatacgataaccaatatttatttatacaatccgcttaacttctcactcgaagtcccaacaacaacttccatttttattggaatacataaattgacagagtgatcattttttagatcgaatacattattccaccagagactataggaatagattctaagttcgacagatcttttatacgtgcgataatggcattgaaccaaagactatcgatgccttgactccaaattgttatttttttatagtccctttctttcccttgatgaaaaaaacctttgcaatcttcgactgtcatgttattatatttttgactaatttcttcaatagctaaatttgcttctgatggcaaatacaatatagttagagtaggatatggaatagtatccgcagaagtagatgatgatgatgcatcgttagccatggttatattatgttttagacttatatgatgatttcgttgaaatatttaaaagattttgagacgataaatcattgaaaattcataaaaggctatatgtttattattttaatataacaacatgaatgctgatcaattcacaaaaagcatactagagttagataatgatattttattcagtggagttattgaaaaatccggacatttaaatattagcaatcaaagggattcgctggacaaacatctaaaagggagaaatgcggaactgattatttctgaatctgcatatacaattgatttaaggaaggcgttcattaaatcttttggaagtttaaactctatttgttatcaatatagttcgctaaaaatattgattatcccagtcaaagaacatgtgttattcttagtaatcaacaaaaatgttaaagcagatgatttgactcagaaagtttacaatattattaattcaaccaaagaactggatttatactcttagaggtcctttatgattgaataaaaaataacttgattttgttgttagtaatttataaaaattattctttatggttctgatgctgtgaccaaaaatctaacaacctaaaataagaggaagttgcttctttaatggtatgaagatatgcctctcgtaattgttcccatagcaaaaaatagttaaaattattttccaaagttttatcgacatatccttgtttcccatcgagcctgtttgaattcaagttatttgtaaccaaggaatcattttgtgatttttgtagaacggccttttgttctgcttctagtttggccttttgttctgcttctagtttggccttttgttctgcttctagtttggccttttgttctgcttctagtttggccttttgttctgcttctagtttggccttttgttctgcttctagtttggccttttgttctgcttctagtttggccttttgttctgcttctagtttggccttttgttctgcttctagtttggccttttgttctgcttctagtttggccttttgttctgcttctagtttggccttttgttctgcttctagtttggccttttgttctgcttctagtttggccttttgttctgcttctagtttggccttttgttctgcttctagtttggccttttgttctgcttcttctttattgggtgttacgtaaccttttggaagtgtcatagctgaagtgacacgagtgaagattaatgtttttctaagattcttaaaataattaattcaaattaatgcgattattgaatcaaaattttttcttgacttgtcctttttatagatggataacagatttaagaactctactctctttttgtcataattaacaaatttttttatttgatctgaaatgatacctttgaaaattaacccttgaaatgcggatgtaacattattaacttttcttatgcaactagcactttcaaaatccactatagtgcattttgaaccacagtgggaaattattacatgattatccaacttgtttagttgaccatgatctatgtgtagtttgtcaagtgtgtaacattgagtcaaaatattaatgatgatttttcgtatcaactctaagttcatttttgattttaagaaccaatttcttgcggataaaccttctataaactccattaagagagcatttcttgtataagagtaaaccttgggtcccaattggtttctatttatacgctggtaaaattcaaattcatttttcatatcagttctacacgagtcaattctcttaatttttagtgccatagttttactatgtatattttgaactttgagtaccagtccttcacttcctttccccaaaatcctaatagcctttagaagagtattgccttccagaattacaaatttcagatttaacgatctaagttcactcaacctagaataataatcagaggtactaaacctgggataacataataaatcaatcaaattagctgatgataaaataaatttgttagaatactcttgcatccgtatataataattcagaaacggtattttttatatgttcatccaaagaaggatattgaccaagagtatatattttgaaggatcgaataaaatcactcttcaagcctctagggatccctattagatcaggcttattcgtgagaacaaattccaaatagtcttttgcgttagtgaattctctaaaaagaagggacctagttctggaattgttgtctaaccattttaacggagaaccagcattaatctctataaatttttctaggtcatgtattctaaatatttcgggacctattttaatagataatttagaaattgttagagattcaaataacaaagcaatagcacaaactttttccttttcatgcactctaccgtgatatttcaatactctaaaaccatatgattcgacaaatttacatatggacctggtcattttctttagctgtccccagatgacatcagacggtctatcactatatttgaattcaattaccagaatgaaagaagacaataaatctttgagattattgtttgagtgagataccggttcctctcgaaaataattattgccaggatttgataaaaactttcttgaactctggattagagtcgctactgagcgtgatgaaatagcactgcccaaatttctattttcatcgattggatctaatattaccagaaaactatcaaaaatcctcttatacttttcctgttcattatcaggtcttatgatgttgataacagagttatcagcagagtaagtagaaaaaaattggatagtagataaaaaagatccaaatttcaaaattaagacttcacaaacatatccactaaacccttctatagaaatctccgctccataaatttttagagatttcaaaaacttcttaagtactctcacttgatttttcttttcctggttcaaattattgattacataagaggtatggaacggagaacggtcagctgcacttttccaattcccgaaggaaacattatagcacgggacaatgttaaatttaactccatcaacataagattccacataaggatgatctgcatatctaagatacggagagtactcctttagagactgcattccaattaactttccgtaagcttcaaaatgaccataatcaacatcatttttaaatttgataaaaatatcgatatcggcttcatttttaagccaggttcctttagcaaaagatccaccgaatacgatttcatttatcataaaaccaagtttatattcagaaacacaagattcaagtttattcatcaccttgttagccatagcatgaagggtaatctcttcttctaatttaggagtacaatccttcaatactccttcgattaatttattgataataggattactcatttctttttatgctcgtgcatcaatggtaaataaatcagaatatataggaccatctgctgtgaggatgctttgctttaatttaatttggtatatttcatctgtaaatggatcaaattgaaaaacaggatcaaaagatacacgactcttaaaatgtcgatttatacgaaaaattgtaagatgagggacatatacggatttttcttcactaaaatcattttgtgtttccttcccgtagccgatatctttttccagcaattttgaaattgcatcataaaggtcatttaattttttagaactttgattatccagccctaaccagataacactaggattagaattttttggaaaacaccctatgttagtgaatctaatctcaaatggatcaaaatctaaacttttcaaattggatataatttcttttacttcaaaattggtcttttcccccaaaaacattattgtcaagtgaagattatacctgttgatgagtctaacatgttgtggaacaaattcatattgtttcataatttgattctgaatattgattattttctcaacctttggaatatctattgccacaaatatacgcatgaatacaatcagatgaagttctaactatattaattctcaataatcaaagtaatcaaaaaacaaatattgatagaatgttcaaagattagattagaggttgtcggttctagaccaattcataatttgcttgacgggaatgcctggtgcaggaaaatcgacggttgctactttcctcaaaagtaaaggatttcatctaataactatgggagacataataagggaaaaagcggttgaaaacaacttgccgatggatgacaaaagtcttggcgaattgatgaaaaatttgagaaagcatcacggaaatgaagttgttgcaaggttagtgatggagaagattaaagaattggaaaatgttagtcttattgtagtagatggaattagaagttatgaagagtacatggtattaaaaaatataggttttgtaaagttattggccattcatgcatcatcaattattagatataaccatataaaattacgagacaggtctgatataccatcaaatcatgaaaagtttttactaagagatgaacgtgagatgagtgtaggtataagcaaagcaatagctctggcggacgaatcgatttcaaataatgatctatctttaatcgagcttaagaatcacgtagaagtaattattaagaagtggtcagatgagtataacaaccggaagcaaaaaacttttcttaccatatagaacaaaaatggaacttgaaagtatagaagttattgttataactccaattaatttgactgaagacgtacaaaaagtggtttttgctgtcaaaaacctattaccagattcagaactagcaataagaaagaataatttgtataccaagatgaataattttgatggtttgagaaaaataaaagacaagataaggtcgaaaaaaacattggctgttttacagagaattctgtataacaattacaatatgcaaagtacttggtttttactaaataaacaggctgcattttctgacgtagtggtattagtagaaagcgaaaatgaatccccattgggacccataaaaataactttgaacggctgcgaattagaaagaattaatgaatggtttgagaaatagaggaataaataaaacactcactctgctgaaaggtcccagtaattagcatctttaaattcgattttgggttttccaagagatttccactccttaaatgattttggatatagcttcacgtttgaaattccagctgtctttaaggcaaaaaaggctaatcctgacaacgttccgacgcttccacagtaagtaattatctcattgtttaagtcaatacccctattttccatgaatcgtttaagttcggaaggatttcttaaaatggaattttccgagcgcaacatggtgtatggaatattctttgaattaggaatatgttctgttaagaaattcaatctttctcgagaatcaattatgatcttatttttatcattttgagcattttctatatattcagcatctgcaaatatggaatagtccatattaatagaatgtgaaactttagaatatttattagattttctttcaatttctaaacctaattttttccaattatcataggtaacttccaataatgcaacatttctgtgcccaacaaacttaaatgaccacgctacccttgacgctagtgccccaaatgtatcatcataaatgactacagaagtgtcatttgatataccaaggttattcataatattaattatagactcggggtcatcgttggataataattcagctaatggtaaagaaacggccgtctttatatgacctttcaaatattcgtccctttttctgacatccacaactctaactttatttttttttattagggttcttagagtatcaatatcacatacatgattcaaagaaggtgttgatggaggttttgcttttacatgtttatttactatctttgcctttgcctttacctttactttgacatcatttttctttcgctttatggatttgctcaagcagcacattcgcctctagcagtttttgcgacaaaattggtatcagttccataatctttgtaaaaatcaggggcggtggaaaatgcaggtaactcaattataggtaaaagtagcttcttcacatcatctacattcttaatttcgccagatccatttccatttgaaattttgtaaacccattcatttaatttttcattacctgtcctttctttcttgaaatgttcaaatattttgagaactacatccagcacctttttagctggaacacgcattattgccttgcccagttcgccattctcgccagtactacccgcaaaaagcattgtatagattggaaccatggatgtcccaatcctagtagcaccaccatagaaaccgatagttgcgacctcatgctgtccacaagaattaggacacccgctaattttgatagtagaatcaacaaagtctttatctaaatcaatatttaattccaaaaatttactttggatttcttttgcaagtctatgagaattagtaatagctagattacatgatgtagttccggaacaacccacagtagatacaattgtatttgcaccaggatttcctagtccattgccggacagtttttggaaaacctttgttaattgatctgcttttatatatcggacgagaaagttttgctgaggagtcgttcgggcctttttttctaacgaaaattcccggatacattctgcaaaaatccgtaactgactagaggtgatatcgcctgcacctaaggttatatacacactgtaataaccagactgtttctgagcaacaacattggtatttaaccatcgagtgtatggcgtgtctgcagaattggaatttattactggtaatctaattttactctttgtagagatagaggaaattgaagtattattcaaatctccagtattcaaaaaaccatcgtatgattttcttgtgggtatagaaattgttgcttcaaccaggattcgttccttcaataataagctctgaaatttttcccatccgatttcgctgaccaaataacgcattctatttcttgcaagattttctctatttcctagtcggtcataaagtcgaattgtagctatagaagtagataaaagcctagattctggagtaaactcctctaataaatggcctataaacgaggcagcgcctaaaccacctcccaagtagatccggaagccccttactccatcacggactgtaggaacgaggcctacgtcggctatccttacataaccatgttctgaacaacatgaaaaattaaatttaaattttctgggaagattctgacaaataggatttcttagaaaaaacctcgctattgctttagcgtaaggagtagtatcaaatggttcattaggacaaactcctgcaaaatgactgcacattacatttctaatggtattaccgcaagcctccctagaagtaagtcctacttcagctaaaccgcgaaatacttcacttacatcttccaattgcacccagtgcaattgaatattttgtctggtagatacatgagcagatccgattgagaacgattctgatagactggcaatcttttcaagttgggtaggcgtgatatcaccacctggaacctttattcttatcatgctaaattcactatttaatctagaaccatacgcaccgttttgaagtctaaaacgcctaaattcatctgcattcaatttatcttgacgatatagctttaccttattagcaaaatattcagattcttctgctaaaccccatttttcattagtctcaagttctttatttttcgctgaagaaagaacatcataatcaatagattttgccaatgttaattatattgtgtttaacaaaccttatattttttatggaatatgcttatttggcgtatattgagcaattttcggaatcatttactaattcaaatttagaaaaacttatagttacaattagaaaacctatattaaggtggggtcgtagcgaagccaggcatcgcaacgggctccagatcaaataatgggcaattattgaagaaacccgtggatcaggggttcaaataatataagtacatatattagaacaattcccttcggccccatctcccctcaatcattcttgggtttacacaatgacaattagagacatttaatggataagaaggaacaaagggttgtaacataattatcaaaaagcagtaataaattattgcacatatatacacattatgataaacggatagaatcttgcggtccaattaacagagtgaaaaatttgagtattaaccaatataaactctgaaaagacgaatattaacacaattttggaaaattatttgttcttcttgaagctaaaataacaagaatgacatcgatctttaccataaataacgccagagttaccacattcagagcattttttctcattatcaacagtggaatccaaggattttatcttttgaatacatttgtcacataacggagcatccaaattatgactagatatgaagacgtctccacattgtgaacacctgaaactataaatttttcctctaggtttccatttcctgaatggattagaggtgaaagtatatagtatttttctaaatggattggccataaggtatatagtatttatgcaatcagacattttagtttaatggcataggaattcaagaaaggataatacgacaaccaaaacagagaactatacgcttctatatagttgtctattccctattcggataaaaaaaactcctgaggaaatcaatatcaaagaaataaataaaaataagggatttatcaattgtctaagatattcaggtgcacttgaaagataattgcaatgctcctcacaaatctttgtaactggaaacagtagtaaaatcaatccaaataaaatcaacatgatgactccaactgtagagatcaaagcacctagtttaatcatacgacgatatctcaatgaagtacccatccaacaatcttaccttaatactaatattcaagtttggatgcatctatagtaacgtatctgtattcaccattttttgagaccctattgaattgtttgttataatataaaaaaggaacattgtctttcgtgtgaaggtcccaaatcttatgtacttgatcgaaatacacttttctttttttcattttgcgtctgattatttcatgacataatatatgagatatttttgcacaattattatcagcaaaaaacttttcatttttgaaatctgaagaaaaaactttgggtctcaaccaagcggcttgtccaaaattctcaccgtgatatgcatccatacgacaatccgaccataaaggtccaaaataagtgagatagaaatgaaatatggagaaacctctttctcgatgatcccttaatagatatgcgagattgatcctatcgaataatcttccaggaattactggtaagatatccacctctacagacaaatcttctttaaattcacgtttaatccaccactgaaaaaatcgcaccatcgaagaaacataaccccaatcttcttgatatcgtttcttccattcttcattttttgatacataaataaaaaaaagcttatcttgcaataataaccacacatcatacatcaataaaatttttgacacattaaaagtctattaaaaacacattcgcatacaaaaagttcataatttaggagcaatatagacaaactagatgtcgtttagaaaattaggtgctgtaatacttttagtttcagatatgaataaatctgttcagttctacagagaaactctaaatttgccattaaagaaagaatctgacgaatggacagaatttttcaataaggaaacagtattggcattgcatccgattaaacacaaagagcatccgaagcagctgaaatcgggccaacatattctgcttggtttttctgcaagtgattttgataacacaataaacaaactaaaagagaaaggtgtagttttttttaaaaatcctaaggaagaagtttttggacagcacgcaataatagaagatccagatggtcatctgatttcaattgtaaaattaacaggcaaccaaaatgaagaggaaggatttgattttttggggttagttggtgcagaatagataaatcatcattttttatataaacaaataacgatacaagttacaattcgtatatagtaaaatcatattagatcaaaatacaatatcaaatatcatacaaaactcacaggttatagtaatcaacgtatcaaaggattttgaaaaaaaagaaggcgccattaatggattgaattatgggactttcttacccggatttagtaaatttagtggatcaaatgactttttgagataactaaaataagaataaacgaaattattgtatacactctttatgaaaggagtcctagatatcccatcaccgtgttctgcagtgatagttccacgatattcaaatatttttttaaaagtctcataagtaatattttgtagaagcctcgcttgtttggaatcatccttggaattattatgattatctaaaatgggacgcgtatggaggtttccattacctacatgaccgtatatgacatacggaagaccatatttgttataaagtgataaaagataaataatatattcataaagatgatcgattgaaaccgcagtatcctcaattatagtaaatggttttctggttcccacggtattctttatagccatgttcaatgcatttttccttgagtgccataatttatttattgaaactatgtcatgagcatgttccacgatcttgccgtcaggatatattctcctttttagtaaattgtgtatgttagatatcttttcctgaaattgataaaaatattctacaaatagcaagcaaccattcttatttaacgtattcgacttaattgaagagtccataacggaataatccaaaagttcaacagcgacaggcacagtggagagaattttcttagtatataaacaagcagacaagacatcagaaaaatacactaagaagagagatctgaaaagaggtagatccaagacctttattctaagagaattaaagattgataatgttccttctgaagctgcaaaaatattttgaggtttaaattcgggagtaaaaatagaatctaatctataaccacaggaattcttactgacatcaggataaaatgaagccaatttattttgaatagaaattagaggagatagaattttttttaatctactgtcacaaataccattttcagcaaaaccttcctctccgtctgaatagataatgtcaacatgatccaaatatctaaggatactcccgtatcctaaaccatgtggtccagaagaattattggaaaccatccctccgatggtgcaataattactacttgcaggatcaggtggtagaaacttgttttgtttttttaattctttatccaagatacccttaactacaccaggctgaacgcttacagtgcccgactggatatccaaatcaagaatcttgttcatgtatttagtaaaatccaaaatcaatccattagataggctttgaccaagtaaacttgtgcctgcaccacgacaagtaacagacaagccatttttgctagcataattcaaagacgttactatatccgctttatctttagggaaacaaattaattcggggtaaatttgatgatagcttgaatctacagaataataatctctaatccaggattcattagaaatatcaccgctgtaggaaagctttagttcatcatatacatccattgaataattaaacacctacatacaatataatatttttagtgtatgaagaaaaaagactaacttcatgaaaatctttaatttttttatctcgatataataaccttactggtttttgatcaatagaaggaaaagaaaaaagtaggtgaacaatgacattaaagaggtatttaagtgaatataaaacattatagaaatggttaccaaagaccaatgattggtataaagatgacagtaaaacaaatatcaatatccataaaaatttgatctgttgttcatagttagtcagtaagattttgcagaatggtatacccatatttatatctgatatttcaatcatagtgattgtaatgaaagtaaaaatacggatttctcgggatactaatcataactttgatacttctactaatccaggagtttttgtaggactagaatgggtttgggctagtaatatggttatttcaacagttgatgttggagatggtccgtctgctctggcgtttaacccaagcaataataacatctatgtgaccgacccagtctcagatgatgtctctgttatccaaacaaatagctccaaacctattgttgatggaatatccgatcaatccataagcattagcaatttggtttgatcgtatggaaacaatatgtagactacgacgattcttctatagcatatcaatagacatgtattaatttatcctaatattatggacgacccgatgtcaggagtaataactctcattacagtaaacctaagtagaaataaattgcatgttaaactaattgtaatatataaacaagaaatagaacatgaactcgatgaggtgttataaaaataactccaagaattattcaaccgcaaccatccgaatgcttcacaggtttaggaaataacatacatgtgcaaggtaagtttagtaattgaaatactgcactatcaaaatatgaagatcgcaaagatattttattcatatatatattcattcattgacaatcatcaattaagataacagagtcgagtcctagaaaattatcaagataaaataattattttcgtcttatttgatcaaaataaaaatgaaaactattttgtaattatatgactcagattctccaatataaagattgtatgttctgcctgagatacaactttgttattaccctcaacaagaataggataggatctaatatttttcctcttaattagatagtctaacatttcacgagctttagattcagtgaaatcatttaccagccaacgtaacgcaaatggaagtgttttaaacctattccatagatatatgatgaattcatccgtgtccttatttttagtaggttttcttgatactagtgaaaaaatatttctggtcttaccctcataaactatgcctagtccatctttagttgttacaaatggttctattgcgtaggcctgattaggcattagtgaaaatgaaggtccataagtcttaatgttagggatagattttccggcatgtatgacatactgttctaaagaatgtccactaagattttgaatcggttttagaccattgtaggttatggtattctcaattgtttttccaatatcacttgatttagtagcacgctttgcaatcttggtagcttcatataatgacaattctgctatttttattaattgatcatattttgaatcatatgaaacagtaactgcggtatctgcaacgtaaccatctatatgtacgcctaaatcaattttaacaacgtcagtatcctttatcacaatttgatcgtctggttcagcagtataatgagcagctatctcattcaaactaatattaacaggaaaagcaggttgaccacctcgctcatttatttcactctcgatagaatcacatatttcataaagtgtcctaccgacatgattttttttcctagcgttttctctaacttgagcagctattcgacctgcacgaatataattatctagagacatgaattagagataataaccccccacaatataacaataatgcaaataatgatttatattaattgaaataagattaaaattagacaaaaaatttctcattagaaagggatcgtagtctagcttggtaggatgccagccttgggcgctggaggtcgtcggttcaaatccggccggtcccattactaattaatagccaaaaacaaaaagaaaaaaattatactcttctgcctctacgaccaccaggttttctagtagtatcatgaggaactggggtaacgtcatctattcgacctatacgaaatccagctcgagccagggctcttatggcagcctgagcaccaggaccaggaattcttggtccaactccacctactgctcttacgcgtatatggagtgcattaataccctttgttttggcagcgtcagctgcagaaacggcagatttcatagctgcatacggagaagattcataacgatctgctgttacatggcgcccgcccgaactaatggaaatagtttctgcaccgcttatgtctgttatatggactaaagtattattataactactaaaaatatgggctaccccccatttatattgagtaatttcctcttgtgacatgaatgtagaattttttgattgtcacatttaaaaaccttcttaagtaaaatgcgtatatcctttttttttaagcaatttcttatttccattggaagtgagaacaaatactcgcccattcccactaactactttgccgataatatacaattttagttgatgcattttcaaaatcttggaaatttccagtagatttttttctgatattgttcctactatattgtattcctcacctccataaaatactaggtcgtgaaaatcaagattatttattgataaaaactccttcaattttggtggaataggaatcttgtcctcctctattagtaagttcactccactttgttttgatagctcttgtagtgaagaggcaaggccatcactagaatccatggatgaagaaaaataatgggcaataaatattccaaattcataagaaggagaaggttttaagacggaatcaatcgatctttttctaaagtaactatcggggcttgatagattgtttattagaattttcaatcctgaagaactataaccgaaaataccagaaacaaccacataatcaccaatacacgccccatttcttctaggtatgtttactaccgaagataaagatccaaacatacaacaatcaattatgatttccttagattcattaatatcaccaccaacaatatctattccaaactcttttgaagctaaagacaacccattaattagtctagaaatttcagagttttttaatgatttgggtaaccctaatgatattaaagcggcttttggcattattccttttgaaaccagatcactcacactagaaaccacagattttcgggctatttgttcaaatgtcattttgggtgggacgtcagtatgttcaactaacatgtcacacgtaacagccaaaaatttattatcactaaattcattagatgaagaatttaatgaatctaaaggcataattgatatgtcatccttacctaaatatggttccatattattgttatcaaatttagatacaattaaattcagtatttgtttctcattaaattttttcatagatttcaattattttattatgaaataatttatacatagaatctactttttcttttgttgactccaatgatattctaaatgcatgttcggtatttgagaaacgtataagaatccaagaactttcgtccagaatgaatttcaaaccatcagtatataatacatctgttgaataggattttaacgaagatagtattttctcaaagagatatttactatcaattttaggatctatagaatgctttgttcgtatttgtttaaattttgaagatagattcatacattcattaattgtattctgatctaatgagctgataataacgctcgccaataacccatccctacaagaagtaaagcttggcatgatgaatcccccgctacttccctctccacctgcttgtgaatcggtttcaaaaatcctttttatcacgtttgattctccaactttagatacaaagacttgaccaccatgattattgacatattgttcaattgagagactagagtcgaggctaatggtaaatcttttgaatccgttattgcgtacaacgccagcaatacataacaataaagtcgaatcaggattaagctgaatgccttcattgttaacgattaccagtcgatccccatccaagtcaaaggcaaaaccaaaattcaacttgcttattttaactaattcacataattccaccaagggatcagatgttgggtcgggaccacgagaagagaatcccagcttgtcatttattccaagatattttacatgataggaatcaagcaactgattagcataattgcatgctgccccccctccaaaatcgataccaactttgaaattatcatttgattgatttggttgtggaatatagtttgttatatcgttcaaaaagctggcattaattttgaaatattggccaattttaacatgaacttggattttcgtttttaatacctgatctaaatcttcctcaaataatcctctcccttttataagcatcttcaacccattccaagttagcgggttatgtgatgctgtaatcattaaagcaccagaatattttctggactctctaaacaaaactggtgtaggtgcaatacctagatcataaacattaatcccttgttctaaaagacatccgattacgatatctgtaattatgcctcctgatggtctactatctcttgcaattacacaagtctgcatatcataattatttttcaaataagatccataaaccctagaaaaacgggctatctcttgtatactaaggtcatctccaaatatcccccttattcctgagatagatatcttcacgaaaataaggaggtagatgcaataatttatgttaactggattaaaaaaagaaaagtaatagatcaggagaaacgcgaaccggtcaacagtacttcgcattgttcacagattcttttgtctatatttgactcaatactatggtgtacatcacatattatgaaagtatatcgcataaaattacatagttgaataaattttgtcatcgtacttggagaataagcattatttgtagaaaggtctttggatatatcgtttatcattttcataacttcaaaattatcttccagtttagctaccaatgaaagatcgccccgggttcctctgatgtaattactaactgcagcttgagtaatcccaagaagttttgctacagtctcttctttaagatcataatctcgaattaatcttttagacaaaatagcacgaatagcaggaatcaaagatttggattcaatttcagagggtaacaacataataataatttctaaatttctaattatataaagctttttttaagaattaaaataaacaaaaaataattgggtgatatggatttagccttcttcccagcctttatcaaatacaccgtttttatgtaatggaactggttggcctgcagtatattctaatggtctcatccagaatatagcatgagttggacaaacacctagacatgcaccgtcagaaatacatctctcgggataaaagacaaatgctttgcctcttttccaaccttcaacaggtttaacacgaagtacatccggacctaatgcggtacaaatttctacacaaagcgcacacccaatgcatctttgttcatcaacatctggaagtatagcaattggcatctaataattcactactcgtcttgtaacgataaaactatttaaactatatgccaataacaaaacagtgttatacaaaagataaaaaactagataataatatctattttttgatttgacgcattacgtctacttgaccactatgaagccagtcttttaattcttcatgtgatggttttgcatcatgcttaccctgaagatgaagatggagtaatacataatttacctgattcaataaaaccttgttggcttcatcgcccttgcgagcttttgcttttaattcctccggaacggttccccaccattcctcaaatgatcttaccattaaaaaatcagcgcttagttactttataaatattttgaaatattaaatcacagatacagaaatcagcatgaaaaaatctcatatttacgacctaaaaaatacatataacctataatcagtttttaaggtatgccctttttgattgaagatattaattacgcacaaaaggaactaaacacatttagattaaaaacctcgggcatcagagatgggtctattcatgagagattcatttttccttttctttgcggttcatattttacatacagaaaggtagacgtagaaagaataacatcaatagctaaagcggtatctaaagatccaacttacttagatgttggatgtggttatggcgatttcttggaaaaaattattcaatatttacctaatgcagaaggtattgaaaagagcgccgacatatttttcaaattaagaagatacaagccagattatattaaaattggcgatgcatataatggaatagaaaaaaaatatgatctaatatttgttggatggatggagccgggggtcgattatagggataaaattgctgcaagtacagatgtaataattacaactttcgataagggtggacaatgtggaatgaatggagaatgcgaaatggatgagtatgggtttgaaaaaatagcaagctggataactccatcctggattgacgttaatacagaactattgaacaaatattattcaaaaataccacacagaaccattgaatttttaaaacagctaaggggagcgcacaatttatggtatgtttattctaaaccaaaatacaaagacatcataaaagaaacattaatcaaatctagtaaaaaagataacagtagggatgtttatgagcatgaaaaaatcttggatgaatgtggatttagttataatgaaatgctcccttcaaatccggatatttgcttatggaaaatgaaatttgaggaataatgcctccagagataaatgatttaggtattgcattaaatgcattaaaagaatttagaaaatattctatttcatctcatcatgagagattcatttttccttttctttgcggttcatattttacatacagaaaggtagacgtagaaagaataacatcaatagctaaagcggtatctaaagatccaacttacttagatgttggatgtggttatggcgatttcttggaaaaaattattcaatatttacctaatgcagaaggtattgaaaagagcgccgacatatttttcaaattaagaagatacaagccagattatattaaaattggcgatgcatataatggaatagaaaaaaaatatgatctaatatttgttggatggatggagccgggggtcgattatagggataaaattgctgcaagtacagatgtaataattacaactttggatcaaggtttgagccttgcagtagagtttgagggacatgggtttgaaaaaatagcaagctggataactccatcctgggatgacataaacacagaaataactaacaaatattattcaaaaataccacacagaaccattgaatttttaaaacagctaaggggagcgcacaatttatggtatgtttattctaaaccaaaatacaaagacatcataaaagaaacattaagaaaatgtcttaaatatgaagggcaaagggaaatacgtacatatgaatttgaggatgttttagatgacgcaggatatggatatttagagagcattaaaagtagtaatgaagagtatctattgtggaatattgattttagttagtagtaatgcaaaaagactaatatgataaataaattaagtagttttcattgaaagttacaacgttaggagctgccagagaagttggaagatccgcattcttgattaattcaaataatacaaatattctactagattacggagttcttttgaagaaggaacctctttttccgattcaagtgaatccaaaggatatcgatgcagtcgtaataactcatgcacatctggatcattcaggatgtgctccatccctttttcttcaagaagattcaaatctagaagctttagcaactatgcctacatttgaactctccgagctactaattcaagatatgataaaaatatcaggcttctatcttccttttcagtatcatgatttagtgaacatgttaaatcatgcaagacatttagattacaagagtagttacaccataagggacacaaacattacttttcatgaatcgggacatgttataggtggtgcaacaattttagttgaatcagatggaaaaaaactgttctataccggcgatatgaatacacgaggttccaaggttctgagacctgccgaccttgatgtaggcgaaattgatatgttaataattgagagtacttattcccaagcagagcaggttcccagggaacaatctgaaagggaattagtaaaatttgcaaaggaagtggtcgagaggaacggtgtattttttatacctgcattttctgttgaaagagctcaagaaattgcttgcgtacttaaaacatataattttccatacaaaattgctatggatgggatggcattaaaaaccaatgatatcatgctcagatatccaaagtatcttagagaccctcagatgtttaagagttcgattgaagatgttgaaagaataacaagctggcaaagaaggaaaagagtagttaaagaacccggagtaataatttctccggctggtatgttagttggcggtacagcggttttttatatagaggaaatttgcaagagccaatacaatggaattgctctggtttcctatcaaggggagggaacgccaggaagatcattacttgataagagacaagtaacttataatggaagaacaataaaatgtttggcagaagtaaatagatttgacttttcaggacataatagtaggacagaattatttgagattttagataaggtgaaaggaaaccctcaagtaatgactgttcatggcgataacctatcatgcaccaagtttgcagaagaaattattgaaaagtatgggtataaggctcatgctccagaagccggcgaaataaccacggtttaaccaagaaaagaaaacaatgttacatataacagcaaccccctggtaaaattttcttacaattgaatagcagatgtactctcaatattaattcaaccattaatagcggacaatcctttctttgggaaaaaagagataaatcatggtatggaatatatgaagaatcgatattaaaaataactgaatatgaaaacaaaggtgaaaaaacatacgaatatgattcttttcctaaaatagagaactggcaacagcatgtatttagatttgatgacaaatacgatcagattatgaatgaaatttctggaaaggacatgataatggacaatgtaacaagaaaatatccgggattacgaattatgagacaaagaccaattcaatgtattatatcattcctatgttcgagtaacaacaatatcccaagaattcgactgatattgagaaatctctccaagaaatttggaaaaaaggtggaatgggatagtaatgaattttatacatttccaagtctaacaacgctacacactacttctgtaccagaactcttactttgtggattaggatatagagcagaatttgtaataaaaacagtaagagaaatagtaaagcaagaaattgacatggtaaaattagcagaaatggattacgataaagcaaaacaagaaatattgaagttaagtggagttggagacaaaatagcagattgtatattattattttccttaaacaaattagaagcatttccaattgatacttggattataaaattttttcaaaaaaaattgagtcaaatcttagacgaagatatgaaaataaatgaaaagatcactcccaaccaatatagagagttatcgaaaaaaattagagaacactatggaagatattctggatatgcccagcaatatctttattatagtatcagagaagaaaatggaagaagatggtagtaggctataatccatctacttatttctctgttttttattatcggtcgatttctttgaagatttagaagttgatttcctagaactggagggcgtattttttgttgttttggtggacgtcctagaactggagggcgtattttttgttgttttggtggacgtcctagaactggagggcgtattttttgttgttttggtggacgtcctagaactggagggcgtattttttgttgttttggttataacatttttctctatttttagtattcttttatccatttccttaagtaaagattgagtctgtttaatagatacggactgcttttcaatagaattgagacctttttgtaatggttgcgttactttttgtatcttttgaatttctttaaacagtttatccacattcttattaatgatctctaggtttttcgttataggagttaaatcaatgtccctatgatcagaactctttttcatagttttctttctacttgcgcgattcgattttccctcttcatcttcatcttcatcttcatcttcatcttcatcatcttcatcttcatcatcttcatcttcatcatcttcatcttcatcatcttcatcttcatcatcatcatcatcatcatcatcctcttctaattctaattctaattcatcatcctcttcatcatcctcttctaattctttttctaattctttttctaattcttcttttttatcttcgttattatcttcttttttatcttcgttattatctaaattattagattttgaagtgtcatcatctagagatagaaagtgatcatcagctactattaatttctcttttttattaatgataataggaaaatattgaacttctaaagacatatctatacagtgaaataaaataccaaatattaaaactgatctctataaaatattacaaagtaataaaaaaatactagctaacttagtggtttcaattcctccgtaaaagtattgtaaatagacaatgcttcttcttcgcttttcgctcccacaatcgtggcggctccactcgtaaggaagctaataagtaattgattttgaaaggacactgttatacccaaattgccttttgatttcaatatatacccattagattcggcgattttcaaaatatttgttaaatcaacctcatttgtaatttgggctggggtaacagtgtatgttctcttgcctcgatctcttccgcataattcttctaccataatagacggaattttgatatctttttgttcaacatgcaatccgcaagagggacattcatcatgtctattcatttgaatcttatcaaaaactaaatcatttagatcgacgtataataatttattgactaatgatggctgctgtccaattgcgatttttactgcttcagatacctgaattccagagacaagataaagaattgatggatgtactccctcagtactacatgttggcatttcatcttcagataattcaggaaagatgcatctaagacaagcactctgatttggaagaatagtacagactgaaccaaccattccaagagctccagcataaataaaaggtatgcctagtcttaggcaagcatcgtttagagcatatctagcatcgatactatccaaagcatcaataactatatcatatcctttaattattttttcagcggtaaatttagtaacggaaatgggaatagcttctattttaacactaggattcattttctgtaaacgttccaaggcagcttcaacttttacctttcctatatctgcatcagtgtacaaatgttgtctgtgaagattagaaatctctattacatctctgtcaactattcgaatctctcctattcccattccaactaattgagataaaaccgggtttcctattcctcctgcaccgacaacacatatttttgtatctttgagtttttccatcccgacataaccaatttcctcgagcataatttgcctcgaatatcttagcatatcttgattggttatttcagctccaccggcaactgcaggcaaaatataaatagaatcaccttcattcaaaactgaacccatccctgcattgttaaaacgcatattttttccattaatataaatattaattaatgctctaggctttccattaatgtctataactctacgtttaaaatcatcacccataataccggatacaatgttgaatgcttcatccaaagttgaagcttcgatagacatttttttttctcctgcacctttgtttaaaactgatggaacaacaaattctattgtggtcaatttataattaacaccctaattttttcgatttatatccgtttgttcaacgtatcattgcagaaactagcctgatatcaggttttactgaactaggagtaggaaggagatcagtaatagattcagtagttttaagtccgttaccagtaacataacatactatattttcgtctttatcgattctattttcctctattagtttctttaaaacacctactgccacaccaccagcaggttcggtgaatattccttcggattttgcaagcaataaaatggcatttttaatttcagaatcagtaactttctcccctattccattatattgtcttagacgttttagtacatatatcccgtcaccaggatcccctattgccaggctttttgcaacagtattaggtttttctacgggtataacttcattagatctatttttataagcatcaacaataggtgcacaaccattaggttgggcagcaattatccttaaattagaaatatcagaaattaatcctaggttcattatttcttcaaatcctttacaaatggcattcaacatagctccacttcctactggaattactagtacatcagggacggtccaattcaattgttccaatacttcaaacgctagtgttttagagccctcgacgtagtaaggtcgcatatttatatttacaattccataaccattagaatctccaattaccgaagcaatcctattagcatcatcatatgtaccatctaccgctacaaatttgcctccgtacgacaaagcttgtgcgattttaacatcctctatgtcagagggggcgaaaatgtaacaaggtaaatttgcctttgctgcatgagcggcggtagcagatgctagatttccagtagatgcacaacccacggcagataaattcatctctttagcttttgaaactgcaacccctgctggcctatccttaaaagagaaagttggatttacggaatcgtttttaatgtataaattcttaaatccgccaagactattacccaaattatctgctttttgtaacggagtgatcgcaccatttaaactgactatatttttcttatcttctatcggaagaatttcaaaatatcgccaataagttaaatctgaacgactttcaaatgtattcttagtaatggtagtatctattttatattggacatccaatggcccaaagcaatcctcacagatatatataaaccttggggaatactctttattgcattctctgcattttagtgcacttataattcccattatttctgaatacaaaggaacaatatgatagataaatctctctaaataatatttagtattacttaactattaggaatcaatcagcctaattcattatgaaaacacgaacgatttcctgtatgacaggcaggtttcatagaattaaccagatataataatgcatcagaatcacaatcaactaatattttttctactggttgaatattccccgattcttcacctttcatccacaatctattatgagaagtactccaaaaatgtgcatttccagtttcaacggttttggttaaggcgtatttatttgcatacccaagcatcaaaatatctttagttcttatatcttgaaccactacagggatgattccatttcgtttttcaaaatcgattttatctatggtttttaacaacctgaaatattggatcaaaaaggtataagaattttctataatactaaaatttactcctaaatctttggggtatttttattaaatagtatgagatactcattaaaataaagacataattgttgctaatgaataattggaataaacctagtgacgagaaaactctgcatataggatttgatgacactgattcaataaatggaagatgtactactcacctatcttatttaatatcaaatatgttaataagaaaatttcaggtagaatttgttgattttccactattaataagactaaatcctaatgttcctcttaaaactagaggaaatggtgcagtctgtttaagaataagaggtagaaattatgaaaaaatcaaagaggagatcacttataccatagaaaactattccgaattagaaaacggggctaatccgggtttagttttttatgaagggaatgacattggcaaagacttgacaacgtttagtgaaagtgctatgaataccatattaagtaaacaactagccataaaaatagcgaataagaatgatatgcaattcagcatttttggaaaaggatatggaattgtaggtgcgcttgcagcaacaggttgtcttttagattcggatcatacatttgaaacaattgcatacagaagtaaagaaaatatcggaactagcagaaaaacagataaccttaaagtaaaaaaattaagcgagcaatcatatccatatacctacaataattttgacattaaaaataataggatactaattacccctcgtgggcctgacccagtgttttgtggtattagaggagaagatccatttataaccacattatttctgaaaaacttgtgtatcgaagaagaattacacggctatatgatattcagatcaaatcaaggaacgaatttacatctagtcaaagagaacagtggaattaacattaaaccatttacctcaggacgtataacttgtcaagttgtatctacaccatccgtaattaatggtggacatgtaatattcaaaataaaggatgagcttgacagtatcttaccagttgcggtttaccaacctacaggtctaacaaagattgcaagcatgttaataattggagataggattgaggtagggtatggctcacatctaaaatcaaataatcaaattacacttaacctagaatacctcataatcaaagaattagcaagagtgtataacattagaaatcccacttgcgagaagtgttctaaaaatatgaaatcggagggaaagaataaaggatatcaatgtcatatttgcaaaacaagaattagaaatagtgtaaaaatgaagacggaaaaggatagaaaactaaagtcgggtctatatattccggaacctattgcgcatcgacatcttaccaaaccatcatccaggtatggtatggaaaagcgatttaatagtatggaaataaaacagttgttaacaagtataaaatggataaaagatagcggggggttgatttgaacttacggctggctttaaaggcacagaaaccgctctgcgggttatgagcccgccgggataacctagcccctaaaaaggtctggcttccccaccccgctaaataatattggtaatataaggagtatatatacggtatagatgaatgaattgaatcgggaccgagcaaaagggtagagattcatttccggttttttatttgcgagactatgtcttgttagtttattataagcatatcaaaattatttgatacaagtgcattattctaattacaacatacgaatttgaataaaataaaacacatagttaaaacgtttaaagtgcactacaaactaactgtcgtgttgctattctgaaatatctatttgataagacgtcaacaattaattagtttattatcgtaactttttcatctttcatggccaaataatcactgcatttgttaaaggagtatatgatcatcttagtcatattagttataggcaatggaaaaggcttggtaggaataaaaaaagaaacttaagtttctagtgcgggagatgggatttgaacccacggacccctaagagatgaggtatctcaattatcctggtttctgagcttcgtgttttaaacatctcacgcctttgaccaggcttggcaactcccgcataaaatatttttaaaaagcccaacatatattctaataaaaaataaaaagaatcattccatttcagctccaccgacaagatttacgaaaatatcatctaatgtgataggagatacagaaaatgacaaattattacgaaccaaaatatcagatatttctcttaaatgatgctcaaaagtaaataatcttatagagtcagaactcatactaattgtcttcccaaaagaattaatgaagtttcttaaatcataaacattataatcctttgatatgttaatgtcaatccttatttgataatttagagtatttctcaaatcgttcatgttgcctctagaaacaaccctaccttcatcaataatgaatatggaatcagacaacatttcggcttcgtccatataatgagtagtcaaaataattgttattcctttatttttccaatcttttatgatagaccatacctgtcgtcgtgatactggatccaaaccgatagtaggttcatccaaaaatagcaaaggtgattcagttgccatggccatcccaactaaaattttctgtttcattcctcccgatagattcaacgcaggaatatcctttgcagaaaagagatcaagtctttgtaatatgtcagatgttttctgcgatgcggactctttcttttcgcctcgtatcctcaaccaattataaatatgatcccacggagttaatgcgcgtaagggtcttccttcctgtggaactatagaaattttttgacgtattttttctggtgactggagtatatcgtcaccgaacaccaatatctttccagatgtgggtaacaattgagtagaacaaatacgtataaaggtagtttttccggccccatttcttcccaataatgtagatatctttcctttttcgatttgtaaagagatatcatttaatgcctttttattggaatttttgtatattttacttacattaaaagattctattgctatcatatagtattgatctaaatttgtacgaaaaatagtttttatagttcaattttttttgaattcctctgacaattcttttaatagatttttttgagtatcattaatcttatcaggcaattttacttcgatttttacgtattggctccctcttccaaattttccatatcttggcaaaccttttcctttgattttaaaaacagcattagctttggtacaagcaggaattttcaatttttcagttccatctacggttggaacccttgtttccgttcctaatatcaagtcaataaatgaaacatcataattatacatcaaatctccatcatcaagtactttaaaaagttgatgcgggattacatgtacacgtaccaataaatcaccattcattccaccctgaatgccttccccttttccagaaattcttagtgttactccgtcctcaacaccagagggtatatcgatctttagattatttgtttttctaactttaccattaccatgacaagtattacaaggtttttctattattttaccttctccgtggcaagtattacaggtatctaacgaaataaaggtggaaaactgattttggttataaactctgcgggtttgtccttggccgttacatgtaggacaaatttttggtgaagttcctggggaagcacctgtccccgaacaaaccgaacagtcttcgattgttggaatttgtatctcttccctcttacctttaactacttcctccagagtcatgtctacgtcatatagtaaatctctgcctctttgtcttctgtttgaggttctggaattgaagctaaatggatcattattaaaaccaccgcctctaccgccgcccattctaccaaaaatctgttcaaaaatatcgcctacattaccaaagccaatatctttaaaaatttctgcgaaattgtcttcagatcccctaaatacttcctcattacccacatgaccgtatgtatcatatcgtttacgtttctcctgatcagatagtacagcatatgcttcagaaatttctttgaatttttcttctgcttcaggcgatttattacgatcggggtggtattttaacgcaagttttctatatacagattttagctcatccttagtaacagttttttgaactccaagtacatcataataatcttttttactcataacaaatcacaaaaataattaagtgtggaattattctcttaatcaagtattatttgatttattggcggcggtggcgtcctccgcagcagcagtagcagcagactttggatcgttattttcaggattttgattaaaagtactatcacttggaggtggagtatcagaccccacatcccctgggtttgaagcgttagcagcattttgttgaacggcctgatatgcagctgtacttatttcggctaacgcgttctttaaatcggttatttttgtttttatggcgtccacattattggctgttatcgactcttttaattcctggattgatttatttactttatccttttgctctggagttactttatcttttaagtcttgattaatcaatttttctgcagaatatagtaaattgtctgattcattttttaattctgcttcttctcgtttctttttatctacttcagcaaatgcatctgaatctttctttaatttttcgatttcttctttagataatttagagcttgcagatatagtaatctttgattccttggatgtagcaagatctttggcagtcacgttcaaaattccgttggtatcgatatcaaatgtgacctctatttgtggaacacttctgggagcaggaggtatacccgacaaattaaacatgcctagtgaaacacaatcagaagccatagttctctcaccctggaccacatggatggttacagcagtctggtaatctgcagcggtagtgaataccttactctttttggtaggaatagtagtatttcgttcaatcagagtttctttaagtccacccataacctccacaccaagagtcaaaggagtaacgtcaaccaacaaaatatcagtagatacttcacctgagattattgcaccttgaattgcagctcccaacgcaactgcttccattggatcaacaccacgttcaggttccttgctcatgacagattttacaaattctcttactattggcattcgtgtagggcccccaaccaaaactattttttcgatatctgaagctgacaattttgcatccttgatagcttgtagcattggatttctacatcgttccactacaggtcgcaataattcctccaattttgccctattcaaaggaatggcaaagttctttggaccagtagattgatcgtatgccaaaaatggtaggtttatttccgtggtgactatatttgataattcgatttttgccttttctgcagcttctctaaccctcatcatcgctgctttatcatttttgatgtctattccagattggtttttaaattcatttacaagataatctatcaaaatattatccatatctgtaccaccaagttgagtatcacctgaagtgctctttacctcaaatacaccaccacccatttccataatggtaacatctaaggtccctcctccaaaatcaaagaccataattttaagatcatgatggactttatctaatccaaatgctagtgaagcggcggtgggttcattaattatccttactacttctagtccggcaatttctccggcatcttttgttgcttgtctctgattgtcattaaagtaagcaggaacagtaattacagctttattgaccgtatcgccaagaaatgcttcagcatccttcttgatcttttgaagaataaatgcagatacttgttgtggagtatattctttccccaatgctttaaatttgtaatcggtacccattttccttttagctgcaataacagttccctcaggatttgaaagcatttgacgtctggcaggttccccaaccattaattgaccatcctgcgaaaatgcaactactgatggaaaggctttccctcctattgaggcgccttcagcagcttgtattataactggctttccaccgatcaaagaagcagcggcagaattactagttcctaaatcaattcctattatttttcccatttaaacttcatctccttttgtatcctctttattatcattatcgatatttttaattatctttttggaaacctctactaaactcggacgaaggacacgatcatttaataaataacccttcctaatttccttagtaataatattttcttccgcaccatcttcaacataagaaaatcctataatttcatgaaagttaggatcaaagacactattcaaagcttttatttctaaaacattttctttttctaaaaagagatcaatattttttagtatattcgtcaatccttcgagaattgaaatatcaactttatggtgctttaatgtatctaatgcacgcataaaatcttcgcgtaaattaaccacggttgacaagatatcggccttcactgaaagtatcctcaaggcattttgtttttcaatattttttctataattatcgaaatctgctaaactatattttaatttgttaaatgtgtcgtcatacaattttctatagtgttccaaatcgtctcttgtttcctttaattcggcagccatatcttcaatggataaatcagtttttaaattttcattagattcattagtgttatcatctaataacagataatcattattttgatcattttttacttgatctttgtttttagttttatccataataataaatttggttaaatctaataattacatatcgattatagtgaacccggaagcaaagaaaataggataagaatattttgcatccagttgatatcgcgatttgcaatcaagcataattactttttatagaagatcttgcaccgcaagcttcacatatcataaagcctaactttttaattttttctgtcctagtatctgggctaccgcaaacaggacaaataacatagtcctttacatatcgatctatcaaacctccgaatgaagatataggttttctgcccaaaaaaataacccgttcaccagtaatatatcctgcagatgctaattccttatttaaatatagtaataatttttcaggatcacgtcttaatgccttcggaaaatccatgaaatttctaaaaattgttcgttggccaacccatattactcttggaacaggaacttcaagtctggcaacttctttctttaccacatttcctagtttattttgtaacctatctaacaaggatatataaccagattcatcttggattgacatgttatagattacaacagaccaattaatgtacgttgtgaataatagatctcttgtataaatagcagaatttagcagtcatgtaatcaccttgatgctttctttctgtatatcttttattgtttataacttggtaaacatattatccagcatatagtatatagtatatagtcacaatctggctattggattgtggattttattatcggtattaatttgtaattttttgagaaaagttaacctgtgtcacttgcgacacattcatttaaataattttccttaatatatctataccacattccatttataagtaaataaacggtcaacaacattttcaacctcatctgcaatacaaatatcgtttgatttttcttcttgtattatctttaaaataatttagagaaatcacatgtattcacacatatcttttcataaaagctgtttggacattacagaagagatctataattgatttatataattaacaagtaataagatcagaatatcgatctatacccggatgtattattttgaattatccaatcaacaaatggatgcaaagtgttataaggtaaatcagcagatttttccacgttatagcttaacataaccatccgatttaacaataaactatgtaattttttatctaattgatctcttttaaaaggatcataaatttcaaaaaaacatttttgtctgtagtatgaaatatggtgagcataacaatacatgagcaaagtagggtctcggctaatccttttatttatctccctttcttcaaatgcagggctattttgcatttcaacataaatttgaagaacccttctttgataattctcttttatcaattcaatattagacggagctatgttttttgatagaaaaatgtcacgctttagttgatcaatagtttttcgtgtgatatcttttgctgataatacatctaaatcatttttgactccaaaatcttttccgaagagaaaaaaaattcctaaaatttcatgttgatcgacgaatggaaagtccaaatctccatcaagaaattttgatagtctttcgtaaatgttaccaggcaaaaagaatcccatataggaatcagaaactatagtcaaggcaattgaagaggtaggatgtatataataaatattttttcgtgttgtattggttgtttatataaagtcactaggctttagaatagaatccagcttttctttcataaatttgaccatcgttcattgccttttttatgtgcaatttagcatctgaatcactaaatttaccggttttgactagttctccaatgaacacattctcttcaacgtcattcttttcttctccggaaagacttgaaaatatttccatgaaaagttttagttttgatatttcgctgaaaggttttccatgcaatacacccagatcaactttaccagtattgacatcaacgcctgcggtttccagcattctttgaactagaaacaacgatctttctgcatcttctctttcgactttatcttttaacagcaatcttgcgcgagcagtagcaagtctcactaggccttccaattgcctgggtgtaacggtaatcatactatctgaatcaacatttctcattttcatataataatcacgaataatatttatcgcctctcgagtcagctcgggttcaataatttgtttagcaaatgtcaagtatttactgaagagatctatattaatagcggcctgagatgatttttgggcatccttatggatttctaaaatatggctggcgattttactatccttttctttttctggaagatcgcgtatcacataaacaagatcaaacctcgtaagaagaggaattggaagatttacattttcagtgatatttttataaggatcatatttgccatacatgggattcgcagcggacagtatagaggttctcgcatttaatgtcgccacaataccacctttagcaactgaacaagtttgctgttccataacttcgtgaagggctgaacgatcctcagcttttattttgtcgaattcatcgatacaaaccaacccttgatctccaagtactacagcacctgcttcaagcatcattattccggatttatctctcactacagcagctgttagtcctgctgcagtggagcctcttccagaagtatataatcccctaggagctatttttgcggcaaatttaagcatttcagacttggctgttccaggatcaccaaccaataggacgtttatatcgcctcttcgtgttgatccatcatctaattttttggtaattgaccccacaattaaaagcaaaatggattcttttatgacttcgtgtccatagatatgcggagcaaaggatgatactagtttgtcatagatatcaggtttttttgacaagatcagtatttgtcgttcatcttctgcactgattgaaattcgctccattgatcgagttttcttatctccagccctacccccaagatattctatattattaccttccattcgtaatctaaacaaagaagtcttttgagtggtggaatttcccgaaacaaaggaagcttcttgatctattctaataattcctgtcaacataatcctatcccctggtctgcattggtcaaccaaatcaccaagaattgtcacttctatatagtgagggagttgccctgcaggaagatcctcaggcaattcttgtaatctaaccaattgaaaatcgataaatagactgctttctacatccatctccatttctttttctgagcaattaacgcatctttgtggtttttttaaagataatccctttaattgtgaaaaactaatttgattgcaatttagacatctataggcaattctttttcctaacggtttaacttctgaggaacgtactaccattccggaaacaccaagtaacttattaataacatcggcatttatgtcacgcagtcctttttgaacagcgtaatttcctattcttacccgaatatgctctctaatctcatttgtataatctggatgtatttccaatagaacagaaataacggcctcattaaaagccgaaagcatttcatctggattatgtgtaatgtcctttgcaagtagtggactgaaactatcaaaatcaatataatcaatagtaatagaagttgatgatgtcgccatcatattattaattttatcaaaatacttgtaattaccgtcacgatccttaaatgaacgtaaaaaaacctccaattcatttgataatgcagagatggtttgttgttcttgttcctgcatatttgatggatttggaggatcagcattactcaatctttaacaccagttttttaaaattagacgtcatattgtggaaattctcatagagaagtttttcttctgacgatagcttttcttcgagttctggcactaaaggagaagaagcagagagtttgactatcttttgtagtctagaagctatgaatggattcaaagatactattaatgattccctatctttatcttcgatggtacgaagataattatttactcgtgcataaaaatctggttctattgtagatacctcatgactaggtgatattctttctcgatttaatgctcttttaatataagataattgatcatcatcatgaatttctactacaccttgtttgctcaaaataatagagatccatctcggaaccgaagtcatatctccttcttttgcactaataaaaataagtggtcttatagatatttcaatatcctttaaatacattactcgtacatcctttagtagatattctagagtagaaaaagtatagaagattgaaatatcatctatacctgaaattaagttatttgcaacatcagcatcaacttcatcaatatcgtcatgtgtaggcagcaatgaattcacaaaatgtaattatcattcttagttaataaaatttcaatgtcgtattagcggtatcctctacagagtattgaataattttaaattagaaaaagatggacagtacataacgatggaaaaacggcaccaggagcagaagccagagattatttctgatattatgtgggtcgaaaaatacagaccaaaacatctagctcaaataattaatcaaaaagaaattgtaaaaggcttggaaaatttaatgaaaaaacctaacgaattaccacatttattgtttacaggatctgcagggataggtaaaactaccacagctttatgccttgcaaaacaaatgctaggagataactggaaaagagatactctagagctcaatgcatcagatgagagaggaataaaaatggttcgcgaaagagtaaaagaatttgcatcgatcatgaagatttcaataaatcaagaaaaaaatgagaagcccttcaagatcattattttggatgaagcagatgaaatgaccacagaggctcaaacagctttgagaagaataatagaagatagtgctagaactactaggtttatttttatttgtaactatctttcacatataattgaaccaatacaaagtagatgcgtcatttttcgattttcaaaggtttctgaggaagaagtaattgaatatttgaatgatatatgtaaaaaagagggagtaaaagtcgaagagaaagcacttcgtaaaatatatgaacatgcaaatggtgatttaagacattcgatcaatatattgcaagctgcctcagtgaacggaaatataagtgcccagcaggttcaaaatgcaataggtatatctggaaaaagcataatagctgaaataataaaattagccattaattccaaatttaatgagtcaagaataaaactattagaattactatatgtttatggagtttcagaaacagattttctaaaatatgccaatgaagagatttataagcttgatctgaaagatccctatgaaatttcatctataattgcagaatacgattatagacttgcaaatggtgcacaccctgaaatacaactcgcagcctttttagcacaattaggcaagataaatttgaaaaaagacaaatctaattaaaaatcatcctcaaactcatcgccaccatcctcttctgtaacatcatcgaaatcttcttcgaattcttcacgttcttccgcggtcttatatgggatatccgcttctcctaagtttccacaaactggacacttaaattcaattgtttgaccctcaaggtctagtagaaattctttggtgaagacctcatcacagtttgaacaaacaagagtagtttgtatattttcttgagtgaatttatgcgactgtacccgaaagattgtgttcaccatacttattttacctataaagaatcggtctttattataaccttatctttttataaatctaaggttttttaacaaaataactatctaaaaatattaactcatgtccaataatttatgcatttgtggaatcactcttacatctttataaaaactacaaacttcatcatatattttcaatatttgcttagttgagggagagtcaaattgatagctaggctggagtgttagaccactcaaattgccaatatttggacgctcaaaaactctagaaagcaaatctctaacttcatttaatgttgtggaattcgtaaatacgacttttataaatgaaattttatcgcttctatttaaagcgatatccaaacagcttagttcgttttttaaaagattttcataggatttggattcgattactttcgaatcagatgttttaaattcaactttacaaatatcaaaataaggcaaaaccaattcaaatcttttccaatcaaaacaagatgattccagatatgttttcatctttaattcgtttttaacaaaatccgcaagggcaatcaaagattgagtttgtaataaaggttctcctccagtaaaattgattttatataggtttggttggagatgttgaaggataagatatttagcttcattaattgtataacttttgccgcttgtaggcgatagagagtattttgtatcacaccaatgacatttgagatgacagcctgaaaaacgtatgaatagagtctttgttcctgcaagaatgccctcgccttcaatgcttacaaacatttcatttaattgaaccttgttatgtttgttggtaacagaaagaccgtcatcatgatccacataattatcagcaccgttatcattattgatttttggattaataactgacataatttgttttatcctccaaaccagctttcaaaattgcttgttttcgattcatgcaagactcacaaatcccacaatgatttgaaaggttagtttttttatcggtagatcccaaataacagctccatgattgaaaaatcttgtcgcccaatatttcatagcctatcaaaagcaattcagatttacttaggttatccatggcgggagaccaaatatgaagcttttttcttatccccaatttaattccatcaatttcagacagataaagtactttttccagagaacgtgtaaaagagggacgacaatcagggtatcgagtatctcctgaatgagcaccgtatattaccagaggaatatttaaagaagttgcccacacagaagcaagagtcaaaaaaacagtatttcttaaaggtactaccatactatagtcaaaagttgatggaattttagatttggatccggtcaaaatatttgttttcccaagcaaggtttttagaaacgatatgttaattatttcgtgttttttactcttcaataattttgaaaagcgctttgcaacgagcaattcattggatgcgcgttgtccataatcaaaagaaatcaaatacaattctaatcccattttttttagatacgcagctgtgctgatagaatccaagccaccactaaatatacaaacagcctcagaaaaattatgaatgggactaaatttttctttcaattatgattactaccctcattcactaatgtaaacctgacgatgatgctgctggagcattgtcatcagcgttcttaaaatatcccactaatccccctaatccgtatgaaactgaaatcatgactctagtagaaaaaagtatcatctcataatgatctgtgtaattataataaattgtaacaactaacaaagatgaaagaagcaacgccccagttatcaattgctcgatactgaaaattttagaatatttttttaagaataggaaagtcgaaatgttacccaaggataaaccagtaagcaatagaaatggataatatttttggaaaaatgggatcaagagaaatggtagagcccaggttaaaccatttatcaattttataagaaatggccaagaaatacttgttgagacccggtctcgaaatacttttcgcattgataatataggtttcaaaaaaagtaataacgagacagcaaagcagcctatccatatgatgtagtaatagaaataactgaaattataaacaaatactatatgtgataaaatcgaagataatccaaaccacacagatataaaaaaaaatatgaatgagaagacccgggtcattcactttaaaaaacttcacagagtatataatttaataaggtaatcctaaaaatatgtgacctgtcagaaaaaacatgaaggcctgtaaattatgcaataaagtaaaattttattctattaattatttattttctgacactttgtgcaatgagtgctatataatcctgaaggaaaaatcagccaaggaaaggaaaaatcattccatttcctaaggctaattactcttgaacatatccacacttattacaaaatttagaagaatatttgattgtaccgccacaattaatacagtattttttttcaatatctccagattgtttattgtttaaagtgttttcatgttgtgtagagtaaaaatctgcgatagcaccagtgggtttaaaggtctcatctatgtccggaaggtacccagaaggagcagaggacatcccggtctttgattcggatttttcttccaagtatgaaagtagacggggagtaggtgtatctgttttcgaatctttgatttgttcacccaaccaaatcgcaaatttttttagcgtcatttcaggtgtggaaaaggttagagaatgggtggacatgtaatcttcagtagccaatctcccattaaagattttcataatatatactaaaaaattgtgtttattaattattgtgaattgccgcatttattacaaaattttgcttgttttggaattgacgcagcacaaacaatacagttttttttcaacccttttgaatcagctgaatcttgcttagtaattattatatctactggtttataggtaggaacctcttgcggcaatgggaaatcgtattcttcactggtggaagatggagtcgaggggtaagtgggatgagaggtggaggaggtggaggaggtggaggaggatcccgcatgaccgccagcagatataaaaccatctactccaaaaccaccgcctccactaccactaccactaccactaccaccattccctgatccggatggataagaggagggaaaagtagagggggaggtagagggtggcgaggtactagaccgttcacctttgcctttggcagaaccagttttatcgagtgctgttttaagttcgagaattacacgacatgctaaaaaatttaaagctgaagaagatacaaggaattcacccattcttgaaaaatattcattactttccatttttccttgtttaaataactgagttgaatcaaaaaaagattcataattatcttgagtatcattaactaattgttttagtttctcgattaagagacccagtgtatccactccaaaggacattacttgaaaatgaataagaacaaatttaaatttatgtaattactgcaactatagatagcaatctatgacaaaattatacttgacaatgttatcatcttataaaaataattctgggtgaaatagttgtgaaatttttaaaagacaattcagactttggtataaatccattagataagaaatataaggtattatcaggcaaaaatttttttgtattatggtctagtttaggcattggattactggtaatttccgcaggatcatttatctcctcttcaaatttatcagaagcaattattgcaataattgtaggatctattgtaggctcgatattattagccttagcaggcaaaataggtagtgaccattcaattccttcaatagttagcatgagaccagcctttggtctgcatggctcatattttcttacaatcttaaatatctttcaattaataggctggtcgacttttgagataacaatattatcaaaagctgcaagcatttttagtaatggatatattgatttttatatttggtcgatcgtttttggaacagtaatcatcctcttttgtattttgggacccttaaaaatagttaaacaatggttaaccaagtttgccgtctgggtcgtatacggttcaacaatcatcatgctcataaatataatattgggtgccaacaatctagatacagccagtttattaaattcaggttctagtgaatttagtttttttaattctctggatttagtcattgctatgccattatcatggctacctctggtcgcagattacaataggtttgctaaaaaaagcaaaaatgcttttttgggaacatttattggattttcaattacaaactgtcttttttatgtaattgggctcttattaggcattagtgacatatttgcaatactacttgcaattcaaaccttcttttacggatttgtcttgctggtattaatcgtagatgaagtagataacgtttttgcaaatattttctcatctgcaatgtcatttaagaacatatataacaaaataaattacaaatatcttgttgtttgtttcacaatagtaggagtagtactgtccaatttaattccaatttatcaatatgaaaactttttattgataataggagcactatttgcccccctttttgcaattgttttgacggattattacatcataaggaaggggcgaatatctgtcgagaaattctatgaaaaaaacaacaagttcaaaatatcagccttcttttcatttttcgttggaagtattacttactttattctctctcctgtttcgccgcttcatgtagaggattttgcactaaatataggttcaacgattccaagtatagcaatttcgattttagtcttcttagtaatagaacttttaataaaaaaagttaaattgaaaaataatgaatattctacagacaagaaaattgagtaaaaagatgatgtaaaatgtcgacattgaaaaagagaatagtaatcctgggtgcaggctatgcggggatttttcttaggtactaacctttcatcaaaattaaacaaggattcaaatgaaataatactgattgatagaaacaattatcatcagctaatgcaagaaatacatctagtagcatctggttttagaactgcagaccaattgaaaattccaatctcatccttaattcaagggaaaaatatacattttattcaagacgatataaagagaatagttcctgacaagagtcttatatctttgaattcaggagatatcaaatatgatgaattgatagtttgtttgggatcttctacaaaatacttcaatataccaggtgctgataaatacacccttcctattagatcaatatacgatgcttcaattattcatgatcacatttcaaaaataattaatgaagaaaataaaaaacacaatatagtaatagtaggagccggggccacaggtataagtcttgggagcactttggcggagatgataaatgcttcaccaaataaaagcaacattaaagtaaacataatcgaggctacctcaactatattacctggatgggatatcagagtcaaaaatagaactgaagagattttaaaagacaaaggtataaggattttccataactcacttgtggaaagagtagaagaacgtattctatttcttaaggatggtctagagattaattcttcattaataatttggacagcaggagtaagaggatataacatagatatagagcctacaatcgacaagaccaatgatggtagaataatagtaaatgaatattgccaaactaatcagtataaaaatatctattcgattggtgatttggcagcaatgaaaaactctaaagggacattatatcctccattagcacaaatcgcagtaaggcaagcacgttatttggcagacaacatagcagaacactataccaaaggaaacaatccaaaagaaaaatttgattatgaaataaaagctcaaataatttctgtagggagtgatgaatatgttggattgttaaataattatgtggtgagtggagatcttgcaaagataattgatgaatttaccaaacaaacgtacatgaaatcgttgaagaccggagggaaaaacatatctgtcaatctatatgaaaatgactttttttcgcaagtgatggcaggtataaccttcgctggattcacattctttaaaggtttagaaaaattggcatagtactttaagataataaaagatactctaatttttctctcttttgtttgctataattaagtggcaattcaaaaaaaaataatacaaacttagtttttcatttatttggattcaaaactgagtaacaataggattacttttcaatattaatatcaatattaatatcaatattaatatcaatatcaatttagtacttcgaattcgcagaaaatctcaaaaaaacagctaaagaaaagaaattgactcgatggacctttatggatgtttatgttcgtgttcgtgttcgtgtcgatgttcatcagtgtgtaagtggggatgtgagtgagacacaccgccatggctatgagaatgatatattttcttaaagacagcatataaagccgttattccaaaggtcaaagtaataaacatgacgatggtgggaccagatgaagaatccaaaaagaaactagcatacatgccacaaaaagatgcaaccgatcctatgataatcgatagaaataaaacacttgaaaaattatttgataacatcctggcagaaatggctggacctactattactgacgcgagtaatgttactccaattgaagacattgaaacaataattatggtagccaggacaaatgaaaaaagtagttcgatatatgaagtcttaatcccacttattttggcactttcgttatcaaaaaaggaaaaaactaaacgcttatgaaggaaaaagaagaaggcgcctgaaagcattgttactgaaacaataatataaagatcttgttcggtaatggccaaaatatttccaaataaaagtgattcgaaattcctggtatacctatttgtaatgcttacgagtaacactccaaatgcaaaaatagcggtggtgaccagccctattgcggcatcaggtttaattttatttcttttgcttatttcatatatcacaaaagaagccaagtagctccaaacaattgctccaacatagtaattcaaacctacaatatttcccactattgctcctccaaaagcagcatgtgaaagtccatgaccaacatagcttagtcctcttaaaataatatatactccagctaggccacaaatacccccaagcaaaactgacacgataactcccctaacaaaaaattcataatgaaatggtaacagaagatcaatcaaatgatctgcactattttattttgtaatctgaaagtccatatgtttttaaaaggttatcttctttaagaacatcttgtggatgaccttcagcgatcacatatttattaaaacaaataatccaaggagaacgattggcaatatgagttatatcatgagtggacaaaattacagtcataccattgttgctgagtgtttttagtatatcaaatattttttctcttgaaacataatctagacccgttgttggctcatccaaaataagaacatcagggtttctaatcaatgccctgcccaaaaagacacgttgttgctctcctccagaaagtgcgcgaatgtgtcgtttttcgtagccgcttaatcctaatatttttaaagtatcttttatttgatttttcaattttttatctatccatggaagataacttttgtagttccatgatcccattgctatgacctcttgtacagaaactggaaaattccaatcaatggtttctatctgtggaacatatccaacagatggataatagaaaatggaatcacagtcattgcaaatgtactcgatatctccattccaaggttcgtaaatcccacaaattagttttaataaagtggtttttccagatccgctaggacctactatagaaacaaatcgaccttttggtatagacaaattgactccctcgactacaaaatcatgataggtaaatccataggatacaccagttaattttagatattcaaaggagcccatcttaatgatatcatttgagatgtttattaatatttaatgaaaaaaaattatggtgtgtatgtattctcaggatttatgttagataggctgctagtatttccccctaatgggactaccatgtgctccatattatcaagcatcattcctacatacgtatggttaggacttgttaaattaccaggaagtgcatcatctctcaaggtctgtactatatctacaccagcttctttagctatttgatcggtaattctatttgaaaagacctctgatgcaaagatggcaggcaccttttcagcctttatttgatcgatcaatttggctatatcaagaggcgatggttctgaaaaatctgatggttgcacagcaccaatcacggtcatgttataccttggtgcaaagtatgcccaagaatcatgataggttatcaattttctattttcgggcggtacactttgtactgctgcttttattccttcatctagctgttttagtaaagcaatgtacttttcagcgttctctgtataataagcagtattattgggatccatctcgattagcttatctttagttaaattagcaaacttcatagcatttccgggatttaaccatacatgaggattaggatggccctgttctttagggaaactaaaatcaaatatccaatctgttgaattaatggtaccaacagcaagttttaacaattgaatgtcgggtttgttcttaagtgactcatttacaactttttccatattgtcctctagaaacaatccattaatgataacaagatctgcattgcttaattttactatatcagatggaacgggttcaaaggtatgtgaatttacaccttctggtaccaaaccggtcaggtttattttgtctccggctatatttttaacaatattagttattggagacacagatgtaatgacgtttaatgttttattagctgcataaacggaattcagattattatcaatgcttatggaggagaccactgctagcaaagacaaaagtattgtaaatgtagctacaaacagtattttggtgttattaaaaaaattttctgacattctgaatcattataaatgattttataaatttttttaatagcgagttattggttttgggccaaaaaatgcatttatagtagataaggggctgcttagatcatatctttctcattttgctaaatgaaacatttagaacattttttcttactattctaactatagaataaataatgtcacggatatcataaacaaatgagcctaacaaccggatcaataaaccattttcaccgggcaattttgtacatcccccaatagcttcttttgttccagacaaaatttctagtatttcattttgtatgatgtttactttatccttaggggttagaatataaacactccccagtatttcataattattcaatattccaaaagattgtatattttcctccttgggttctatttttgctacatcaattagtcttaatttatcatcttgatttactgacttgactttcatataacatatatcgtattcaaaagattcattgctagcaaccctaccaggagttaatatttcagaataaatacaggtagcttcatcatgaaccttaatatttgaaacctgatagaatctagaatctctaaatggtattatttgatcaggtatatattctaagtaacaatctttatcaacattcaaatttattatttgagatccaaagtttttattcatcctgtatattctagtagcactttgagtagtaacatgtgacttagctgaattagtaagtgtaatatcaattctatacctatcaccttgtaaaatgcctccagatggagaaataatataaacataagccatctcgggaaatgtttcttcaagataaagggcacgttttatgcacaaaggaaccttgtaatattggtgttttatggatgttttatgactacttggattatattctagaccaagttctaaaatacctaatttacctgattgtcctactgccaattgttccaatggattatcgtaatttagaatttcagcaggaatattttcaggagtacaataagaaagattatacaaactcattgaaatcaataaaagattaattgatggctaccgatttaggaggtgaatcaaataagacattctttacgatttgttctgccacggttttaacaccctgacctgttttgctattaacaaaaacatatggtttttcatttcgaacaattttggcgtctcgctccatgatgcttaggtcagcacctatgaaagaggcaatatctatcttgttgattaccaataaatcagacgtttcgattccaagtccacgctttcttggatatttatcccctccagaaacatcgataatataaataaaatagtcggccagcgcaggactaaatgtggttgtaatgttatcgcctccactctcaattattatcaaatcaagattggggtgcttggattccatctcctctacaacagatatattaattgaaggatcttctctcactgcagtatgagggcagcctcctgtagcaatgcctattactagatcctctggcattaatcctttttcggtggcaaggttttttctcattctatcggcatcttctctagaaacaacatcgttagaaataattccaacgttatatccatcattctttaaaataggaactaattgttcgattaacatggtttttcctgatccaacaggtccgcctatgcctatacgtggtattcttgaaagtgccacataaaaataaaggaaaaaatcaagtaataaacatttttgaatccatctgttcatgatgcatttgaattatgtcaagttgaggaataaattgccacatactctcaagaggtctattgatattttttttcactgttgatagaatcactggtttcatctcatctataagcatctgcccctcaatatgctgaagaatacccaatctaagggtagctccaattacactgacaacaaacccatacagcaacatcaaaccagatcgctctttagttattttcatagaattgcatcccaaggcgtatgataaaggataaactccctttgcatgaccgctcttaatattttttgaatagaaatccaaatattcatcattatgaataaatgcagaaacacatcttaggaactggattcctgatcttgttgaggccgaacgagtctcatctacaagtctcataaaataatatgtattatccaattctaataacgacataaagtctttcttttgaatacaattatacacattacctacaacacagcaatcagtaggtcctatttgctgtaaaaggtaagctttgatgaaatccgaaatctcgccgtatgttagctttctgtttttatcataaaacaataattccaggccatttgaagtcgtgtacaaacccgttggaaaaaaagaatcagataattgtaagaaacttaaatccgcaatggatggtattgattcgatatccttatcagtgtgcatgaatgtcaaatccctgatcaggttcaaaaatgagttgctctgagcgaatttctatgtagtcttttaaatctgacaacaatctcaaaaatagatttatttcatcgggactttgaataggaaaaattatatcacgattttcgatttttaatggcctatgtaagtttccaatagtatgtcctacctttagtgccaagttagtgagttcattatcgttggctcgctcatgcttgtgttcatggtcatctccatggtcatggttattgtgtaaatgatttttaatattcaagatagccacaagctcaggagataattttatgactatcattttagtatcatcaagaaaaactacatcaccgtctctaagatgggttctagaaggcaaaataaatccgatatcagtttctttgtctgaaacttttctcattctaaccttctcggtttcagatctttgaattactacattctcgacggtattttttttaactgactcttcatatttttgatataattgtgaatctttctttatgtttcctataatagttgtaatggttaacatcagatatcatatagaggtcaatcttatccataaaaacaattttaatatcttaatcttattttgagtcaagctaagatattcgtcaatattattttctgaccaaacagaaacatcttgaaacttatgttttattgtctctactgacgttgtcattaacactttctagatcatttgtgttgttttttggatcgagatctggattaggattccttattttgttcacagcggttatcatattttgtaaattttgagtgtaatcatactttccgtagtgtttatagttgctaggatctaattcgacaaatactagccctccatcagatatttcaatttttgaaccaacctcaaatttttgagccaccacacattgtcttaccaagtgataaggataatcaagattgaggtgagatttggggtctatcaaacctgaaatcgaaaacaattttccaaatttgacaatcacatgtctaatttgcaaagggtcgatgattaacatagaatcatcaatattggacttttcagtacaatgtctaatttgcaatagtaatcacctttttgaatcagcaagtgcttgaggattgaggtcgtctgcagctaaattcttatcaatccttaaaacagatttggccatttcgcctgatgcttccaatgccattgtttttactaaaactggatctaaaacgcctttagaaaccatatttacaatttcaccactgtcgatatcaactccatatccatccggggaagctttagcattcattactttttctaaaccgttaaatccggcatttgttaatatttgtctcataatactttcaagtgcagatgttaccacttctaggcctacttgctccaatccactgagtttgagttttttgattttttcaataatatgcaattcggcagcaccaccccctggaacaattccgtaatttaatgcagcttctgcagcatttattccatcaattgttgatctccatctctctaacgatgtttcctttgtagaacctgatatcagcacagtgatgatcttctttcctctaccattttccaaatatattataccgttatcctcatcctcgtatattttctcagaatcaccaaggatatctttattttttagatcatctagtgttcgcacaggttttgcgcccgtatatcttgacaaatattctatttcttcatttgaaatgtggaccgcaaataatccctttgatacaaaaagatcttcgactatttgatccacttcaggtgaagcaataaaaagagtatttgctcccgtttcaactatggtatcaacaattttttttgatttttccaaacgatctttttccatagtaagaatatcttgatatttactattttctttgatccatgactcttttacgggttttagatccaatctcaaaattagaattttcgaattttcaactttgctgggaagttccggatctattctttttctttccaaaacaatgccattaaaaattttatcttcaatatctactcttcttattacctgtactgccttatcaaaatcatataatccgttgtaaatcgcatcttttcccacggtacgtaacgctttaactaccaacgtatgcaatattcgaccatccaattttgatgacaagctcgtttttacgatttgatcgagttcaggagcatcaaggttgatctttatggcacttttttttagcaattcgcaagaatgttttataccactttcaatgccttcaacgaccttagtaggatgtaccgcaagttcacgaattaatcttttaccttctttgatcatctcggctgccaaaattacagccgttgttgttccatcgcctactttttgctcctgtctttctgcaatttctactatcattctcgcgacaggatgaattgctctcaatgaaagtaatatggtaacaccgtcgttagatacatgtctattcattgattgatcgatcaaaagtttatccaacccttttggtcccagggtggttctcaccgtttcagctacggccattaccgcgtttgaattagactctaaagcattgaattcaatattttcagcaattggtttccaaactccaaaattttgtggtgaagacatattttctaaaattaaagaccaagagataaatgtatcagaaatattaatgctgaatagaaattaaagcaagataaactttagaaagaaaaaaagatagttggaagtggttgggaagaacccttatgccataaagtatctttgtgctaaagttagttcctttgctggatcaacagtagcgatctgcccgtcaatctttacttcatatgtttcatgatctacagtaatttctggtgttttatcattccacagcatgtctttctttcctatacttctgcagtttttaacagccaatgtagttttttctaatcctagtttctgagggacgccaagctctaatgatttttttgacatgaaagtaaaagaagtcttctttacagcacgccccatagcaccaaacattggtctataaaataccggttctggtgttggcaaagaagcatttggatctcccattatagaccaagcaataaacccacctttaaagaccatttttggctttgcagcaaagaaagcattgttgtacatgactatatcagcatactttcctacttcaagggatcctagatagtctgcgacaccatgagttatggcaggattgatggttgtttttgcaatatagcgctttgctcttaaattgtcgttgtcaccttcctcacctttcagttttcctttcatttttttcattttgtcggcagtttgccatgcacgaattacaacctctccaattctacccatagcttgactgtctgatgaatacatactaagaactccctcatcatgcattacatcctcggctgctattgtttcggctctaattctagagtctgcaaaagcgacatcttctgcaacaccagggttaagatggtgacaaaacatgagcatatcaaggtgttcatcaatagtattgacagtaaatggtcttgtaggattggttgaggaaggtaaaacgttttgttctgctgcgatggcaagtatatctggagcgtgaccaccacctgctccttctgtatgatagctgtggacaactcttccgtcgatggcattaacggtatcctctaaataagcacattcatttatggaatcagtgtgtattgcaacttgaacatcagttaaatcagccgcacgaagtgatgcatccaaaacagcaggagtagttccccaatcttcatgatcttttagtccacaaacaccggcttcgatttgttccatttgggtggctaacgatggatgagaatcattgcctttgcctaaaaatccataattcattggaatgtcctctactgattctaacatcctactaatgttaaatgtacctggagtacacgtggtagcattagtaccatctgcaggaccagtaccaccacctatcatgttacatataccattactgattccatctatgtactgctgcggagaaatcatgtgaatgtgggtatcaaaatgtcctggagtacagattgtatgctcaccagccgttgcctcagtacatgcagatacgattaggtttctatcaacaccatccattactaatggatttccggcttttccgatacctgcaactttaccatctttaatacctatatcacccttcactatcccaatcacaggatcaagcactacagcattcgtgattacatagtccaaagcaccgcctgcactggtaacaccaggtgtttgagcttgaccatctcgaagtgtttttcctcctccaaatacacattcatctccatgagttatgagatccttttcaatctcaattaagagatctgtatcacctaaacgaaccttgtcgcctgtagttgggccaaaatgatcagtatattgtttttttgttacttttaagaccaataatatcctctcctaattacccattcctttaaaaccaaagaacttggctttttccattgtggatttctttatatttgatgacttcatacttccatttgttagaccattaaatccaaagcaaacttttgatccccctaattcacacaattcaacttcctttgtgtcacctggttcaaatcttactgaggtaccagctgttatatttaatcgataaccaaatgcttgctctcttggaaaatcaagaactttgttgatttcaaagaagtgtgtatgtgatcctatttgacatggcctgtcaccagtatgttttacagtaatctttatggtttttctgttttcgttgcaaggtacatcgccttcagataaaatatattctcctggaatcattataaattagaacctccgtttaaattcaatttagaaataattttaattgtcattcataactcacctattgaactggatcatgaacggtaactaattttgtcccgtctggaaatgtaacttccacctgtactgtatgtatcatctcaggcactccctccataacatccgctcgttttaaaatatttcttgcagacgtcattaattctgcgactgattttccttctcgtgctccttctacaacaaaattggctatataagcaattgattcaggataatttagttttactcctttctgttttctaccctcggcaatttgtgctgccgtccatatcatcattttttcaatctctcttggggctaacatcatgtttaattcacatataacaaacctagtgagttattttaaaattcaaaataataattaatatatatgaacaattaccattatcaaatatttagtcgatgtcgactaaatcggatgtcattagtcagaaattttaacaggtaaacacatctttaaccaatagtatgttttgtcgtagtgaccattttttccagttgggagtctgaattcatatttttctttcattgtatgaattacgagtacattttcatttatagcagtgccaagcatattagaaatcaaagttctggtatcagggtaaaataccattttttttacatccgggtatttgatagagacttcgttggacgtgtctgctgctcctgctcccgctgctactgaaccgtgttctttagaaataaatgaatcctttatcttaatatcagagtattctaatttttcagacagaacataataaagatacggtccaattccagcaacaaaacccggatctgtcagttttcgtaacacattttttttaaccatgataattctagtaggggtaaacgtaagaagataatcaatcttcatgggtttgcttttaatataacccgaaagcctcaacacaataggttcaatattttgagcaagcattaaatcataaaacttcttaattttttgactatctgacatttttgaatcagatttgatttttttcagatttatctcaagctcggacactacagtagtaagataaaagacgtaaaatatactttaattgaatgattttaaaataacaattaggtcaaggcaggaaaattcaagaatagatagaacaaaagaaaatgaaaaattaatggcgctgctgatcggttggtgggtttgttggttagtcttgaataaaactagactatcctgccctagaccagcctatccctgcgggtatgttagtgaatccgaaaatagcaatcatgtaaacccatgcagtgaatacaaatggccctgtaagtgcaggtaatccccactgaccaaagaacttttggagcgcaggcattaccaccacggaacaagttactgtagcaaggatcgccagtaagaatgactgtggagtaagaggcacaaaactagttaatgcaatcataaccagtacctattaaacccgtgcaaaccaatcctagtctcatgagtaggcagcttcatcaatatagataaagcagcaccaattgctgatcctattaaggccataactccagcaagatataacggcgaatattcattccatcctgatgtatacgcatttgtaaaccaagctctatcttgtacaccagctattgcaggtgccaattcaaatgccaaagtcagacctacgacccagaaaacaccagtcttccaattctccacaaaggtaacctgagatacacctttgaaagtagcaacgatgaattctttggcggtccatttgaatttttcaggtgggagaggattatcgcttccgggaattttgtcctctttaacagcaggaggtacttcaggccaaacatcatatccatatcgtttactcgcatacatcatagcccaagtagtgaagataaacgaagatgtaaatcctgggattgccactgcattagtaacgccgggtgcctgtggactaaatatatcgcccataaaatgcgaaaacgccatccaagctactgcagttatgactgctccaaatatcgagagtgtcaatgtcaccctgttggcttttacaaacggtccagaccagaaggccattccggttaatatcgaattatacccaaacaacccaaaagtaactagtgtataatcggcacccagtagtaacgcagttcctgcaccaattaatcctgcagctaccatcatgatacctgctttgcgcgaagctagtaggacacctgcaagaataaaaataccagttaccggcgaactaatcaaaggaacttcagagatgccattaaacagtatatagaagaaatctacaaaagggtctcctgacgaatatgttggtactcccatacaaggattttgtacagctatagtttaacgatttgtattaaatatcagtttattaatcaagtaaaacccattaatctcataatttagtttagcaataatacgggtttgtttgattcagaaagaattttccttgttacatgcccaagatcatcagaatttcctaaccctattgttccaagaactatgaagtctacatttaagtcattagcagttttaataattttgttattaggatcccctattttcacaactctttcacatcttttagaattctttataaggatactagataacatttgtcgtcctctttctcgactcttttaattagctcagtaacgtactcagtattttgttcgtagtcatcaggccattcaattatatgtaccacataaattatagagtcagcttggaaagcatgactagcataatctaatgctcttattgaacatgtggaaccatcaacagcgactagaattcgcttaaaacttgtattaatagggttttcagagggattgtttttgggtatagaaaaccatggtcataatttctaatttgaaactttgatctgataataaatagaagatttgataaaacaattgaaatttctcgttttgattcaataatcggttttactataagaaaacaagctgcagagatcgtccagacaatacttagtaatatccaaaacaagaaaaactcgtaggaaaatacatacccagagaaaaacaatggtaatggccagatcacaaccaaaatgagtgtaaaaaagattccgtatttgtacccaaatatagttctcttctttaataacgcttcatcattgtcttcttttatcaaagatctgattctctcctctacaactacgatccgctgtttcgtaatgttgaaattaaagttctaaactataaataattagatcagttattttgtaatattaaatcaatgacagattccatagacgagttaattctttctgctttgagtagggatgccaaacaggatttgaatgaaatttgggattttttaaggaattatggacataatttaagtttggagcagatagattctcgcataaaaacacttgaagatgaaaaaataatttcaagatatacaatttctattgacaccaaaaaagtacgacatagaataattagagtagttttggtaacttttaggccctcacagcacctggcaagccgaatcgaaggattaaagaagtaccttcaggacgccccgtttgtcttattttcaggaaaaacaagaggtggatatgactggatcacaattcaagtattttcatcgcccgaagttgctgacgaggagagcgatatttatagaaacttgtttggagatataatccaaacttacgaagtatatgatttttctccaataaaggaacctacatttaacgcttttacctatacagataaagaatataaaaaattcttgaatgaatggatgcctccatttcttggaaggtaatagaagatagaagattcaaataattatttcggattatttagatatcttgcaggtttagctattttcaagtttttaaatctaattgtatcatcgattaacgagtgaattttaagacgcaagtccatcaaaaagcttaagatatctgtactttgatttggttcaaaatttagctgaacttcctctattatgctatctagcctagcaagagtaatttttaatgcaagggaagttttctttgttattttgagtgtttttatattcttaaaattaatattttcgtttgcaattaattccaagtcgtcacctgaaataccttgtttggaaaatacagcttttacttctctaatttgtcgaatagttaattcattttctataatatgatctgtaaaatgaataatatcatttggtgaaaaagtagttaattccaaggcttggcttacactcaatttgtttagcattattttttctttgacatcctgtggaagttttaaaagttgaatcctgtgtgaaacatactcctcacttttacctatttttttagccagttctgtaacacctccccaacccaggtcttggacatatttcctaaaagcctctgcttcctcaagtgcactcatcgattttctctgaatgttttccgttaattgaatttcaaatgcttgtttgtcattcatttcccttattttgcatggaatatgacgccacctaagggatttgcttgcataaaagcgtctatgaccagcaactatttcaaagttattttgatatggacgtatcaaaatgggttgtagtaacccatgctctttgatactcgaaacgagtgattctacttcttgataatcattaaatttatctctaattgaaaactgtgatgggcgaatcatttttatctctatatgttccactatactggtatcgaatgcatgcataaattaaataaaatagtctaatacttatacgttttcatctcatctattgaaatcttatacaaaatttaaataaaattgtaaatatcataatttaataattcatgctataaactatctttatatcacatttatgttagtatattaattaaaccttcgataaatagtgttttgattattttagaaatgtctttgcaaagtccaattcgatatgaaaaagatgaatgtttcctttataactaaaacaatcaaacatttagtttgattctcgatatcttatatttcctctttcttaaaagaattcaaaaaggacattacaatttcgcatattcccgtgggaacatgtattctgtttcttttaataaaagtcaaagaccataaaatctacatgcaatgatgcagaaaaggtctctttgtgtgacggatgaataaattagataaataaaactcatgatgcatcaatccacctttttgcacaatcctaacatcataatgtactgtaggatagtcagttccaactaggcatgcaggaagaagaaacctacagcaatgataacatatacgactgtcaccgtaactccttctaaccaattaatgattccatcacgagatatgtaacctattatcattattcctaataatatgctgatgagctcaaataaagtaaaatctagagtaaaacgatgacccgatataatcccaattataactaaaagtagcactacaaacaaggcaagttgagttcccgaaccgattcctatatttagagctagattcatttttccctttagtgtgaaagcgattgcacttgaatgttcggcggcgtttcccattatacctactgttaccgcacctatgtataattcagttaatcctaatttttgccccactgcttccacagaatcaaccattattccacttaattgctattcgtgttacaacaaacaaaagatacaataaggattctttttttactccatctttgctttttactattttcttgctcactatctttttcttctttactagtagaagatagaactggtttttgtaatttcaaagtaaatataatgctagcaatataaattccaagtaaaaaagccactacgtcgctagccagctacaagttcaatgggttttcactatttgttagtaacaagtaagaaaccgagataacagttggtatagttagtctacgacggagaacaataacagagtcgattgtaaccctaccccttccttatcaaatcgctgttctctaaacctaaaagcacttatcgcactgcttaaaccaggaatgagcaggatgttggcaagtataccacctatcatcgtacctttgaagaaatcaaaaaggccctcgttgatagacactattccaacaataatctcagtaggattttcaagagttaccattaataaggaaccaattgttatcccgtaatacaaaggatttcagtagaatcaccaatcatctttgagagtggaattaatgctatcgcagaaacaataaatggatcatagtatccggcattaatttatcgcaaaacaatagcaattggaataaatacaagaaatatgtataataatgaagactttttcccttttttgaatttcaaaccccatctcctgaatttgagtgtttagctctaatacttaaagaacaaggattaaggttcatctgagatcttaaatccatcacttgttattatattttcaatgtgataagatcttactgctactaaaaacagaaatctaaaaattgtttcagattattcaaatataatttgatcgatcaaattatattgaaattcattgctcaaacggcggggttagtggatagacaccaacctggtctgaatatgctggttttggatccttatcatcttttggttccatagtaacaaacagatcagtatatgtgtatggataaacttgtgtagattctaaaccaaaagttccatcctccttcaccatgccaacagtcaacggatattgagatgcaccgtagtttccgtcataaagccatacttcaaaaactttaccttctgggggatcgtagttcaccactccttctatgtctagtgagtgaccatcggattggatatctaccaacccgaatacatcagcttgacgcccaactattattccggattgatcagtggttaaagcgtagccgtttgttacatagactacgccaattaacaatgctatagacatatataatatggatattcttagcgaaaacatctaccgactaataaatggttcttgtatataaagattgaagggtgtttcaaacttatctatttttctaatttagaagacaaaaagagtattaatcgtattagtagtaactatcattttacattcatattatacaacaacaaactatactcaacatgatatcaaaataataaaaggtattggcataatttgatatggttttttcttgtgaatatatactagaattaagacatttatacttgttcttgtaagaggagttatgaaatcatacagtcgtaatacaaaaaaagcaggaatcgcttttagtattgccattttaacagtatccataatgctaggcaatggtgatatgttatatcaaaataaagcagtagcacaagttgataattccactgttattcaagaatttaatggaaagcttgaccaaatacagacaaaatttagagagtttgtcgaacagaataagatcaatacaacgtctctaactttacctaatagcagtagtatatccgaagctttacaaaaattaaattcaactaaaatacttgaagaagtatctaatgcatttaacaaagctttaagcgaagcagggattacaaatacaactgaagggatgaaggataaatatggtggagatttatccaagctcgttcaaaagtttgaagagataaaaggtaactcaacaaattagtctccaaaaccctctttttaaaaaatatttgagtatattatattttattataataaagtactcgtttgtttaattaagtaaatagtagttctagaatatagtgttaatactaagtagatgataataaactatttactttttaaaacttgccaatatttttataaacatgtaatggattttttggactcgatatttgagaatagatcaatgaaaaatactttgaattctttcatataactaggaaaacagaaaatcttcgacagaatatgtcgttactagtagtattactaccatcgttataaatcaatttttttagacattccaggtattgatcattagtcaaaaaaataaaggttcttagctatttataatcggataaattgacgcttttcttattgatcgtgtcattgtctatcatgtagacatatggttttttattttattttattttaaacttgaggaaagacttgatcaatcaattgtcctaaatgatcggatttgggcttattcattactctaatattattaattgatggaaagaatttgattatgcattcttaagacgcttttggtagcttattctcaatattagaaatactggtgaaatagaaattggaatcataacagcaatatcatgagatagaaaagatacgatcagagttgtagtgtatacgatagggatcacactaacctgaatcaagaaatatcgggctttatgacctaaagtcttgcgtgttttaataatactcaccaatgtaattaaaagtagtccagccaaaatttgaacaatacaagaaaaaatcaatgcattttcatttcctaattgcaagagccctattagagaaacaggagtaagagttatcgttaccaaaaatattagagaaatgaaaatggtgacatcttccaagttctctgtatagtctaaaagtagagtaaatcttgaccagtaaaaaaatacaactataaagccgcatatgtatgctacaagagcatggaaaaatacatctgaatcaaaaaaaaccctggttcggaagttgctatagtggcaagataaaaaacactgaatcactgaatgaccttagcctgtcagttgtaaggaatccttttattgtcctgtcaatatcatgttacgaacattataatcataataagctgtatcattaggttttcaaaaatttgaaattgaattagtagatctttttgcacaatagctgaagttaagtgaaatattgttactagttcctgttgaatcttaaggaaaagttttcattatttcatacttttgccttgctaataaaatatttcttgacatatttagaataaaaggatataatttgttgtatcaaaatccactaacaaatagaattttatgaatttctttttacatattgttatcgacaagcctatgacaagtcacattgttttcatacttgtcttagacgagatgctatgtttggtatcaaaataccaaacaagtaagccaaactaacacctaacaatgttcctaacactctttcatcaaagtgatattcaatattagtagatgtcggatcacccgtacaacactgaccaaaaaaccaaaaaggttgtaaatgcaggtgagatataccaacgaattgaaattgtagctgatgctgtaattaatgaaactgcacaaagggatgcgatagcaattggtggtagactttgactcaagagccaagaggctatcagagcgcccacaaacactgaaattgcacgccctacgctccgcaatttctggatatctttgcgtgggcgcatcacaaacaatgcggctccaactagccaaccaatatgatcaaatcctaatgcaaagcctatagtagttgctgtagcagccatcaagcccagtcgtaagccataatttctcgactgtacgcgactcattaatgggtatctcaggaggttgttgtggtttgtgctctctaaaacataaggaccatccataggcaacaacagagcctatgatatagagcaacgctagtggaattgaattagcaagtccttgataactgagtccaacgcctgcaagtggcaaacagattgttaatgctacggtaccgaatgatcttctagataaaagtagtgctgcaccaaatgatagcaagaacatacccgggattgcaactatggcccattgtgccataaatgaatccaacattaagaatacgcctatcagtattccaacaacaattatctttcgacgctgtttacgtgttggaggtagacccataattgaagcaggtaatgccccaagaagcaacgacaatcccgcttcgacatgaccggtggcgataattattacaggtatagccgcgatcacagcggtaaaacgagcattacgccaactccatacgagattgttacttttcattgccgctgcttctttctaaaaattatatttattatagattgcttgctataacttatgtttaatgcgatttacaatagacgtcttggtttatcatctcaacgattaatcccaaacatgaaatcaatatttaacaaggtctttagatcatgtttttgtaggattttccaatcataaactatcaatgacgactttttaattatcatactatccaactttaatcacataatttaatcatcataaagcatttttgtttaatttcatttctatttactaggaaaaaaatatagatctataacaatttactacgttaaagttaatatacaatactgattttaatacttcaatgaaaattaataccatctttttgttgactgttgttggagtgtttgcaactttttcattatttacaatgtcgaccaccaccaacttcaatgcagttgctcaatctaatgaaacggcagttgctccatctaatgaaacggcagttgctccatctaatgaaacggcagttgctccatctaatgaaacggcagttgctccatctaatgaaacggcagttgctccatctaatgaaacggcagttgctccatctaatgaaacggcagttgctccatctaatgaaacggcagttgctccatctaatgaaacggcagttgctccatctaatgaaacggcagttgctccatctaatgaaacggcagttgctccatctaatgaaacggcagttgctccatctaatgaaacggatagcaacccagatttctatgcaaatttcacaaatccagttatggtttcgaattctgctgcaacaggtaatgcaacctttactcttggagacggctcaactacgatgtactttgtaattaccgggaacggactcgggaacattactcaagctgttatattacagagtacaggtggccgtactacagacttggttccgctttattatgcaccaacttcgggattaattaccacaggttctggaactgctgatgggaatttcacatctgctaatttcgtggacggacttaaaggaaaaccgatgtcagatttggtcaaaaaaattcttgatggagagatatatcttgcaataaagacagttgatttcccacttggtgaaattgcaggaaaactagtaccagtaaagtgagataaactccaagcattttttttgattatttgcaatttgagaatatcagtacataatgcagctcttttgcaaataatatcgatataaatttctatgattattttttattaagatcttgatttgatattgattttattcttccatgatacagactaaatcccatatttatgaggacatgactcaacaaacggttctactcactaaagaaaaagggttgtggttttcattctttagaaccagatttgaaagaatgtattaatgttgcaaagtttaatattagtttatcctgataaaaaaagatttgaaacattcaagaatcgtttgaagctagtcttaggaaatgtttttgtttttttttttggaataattaatggtcagaatcccatcatttaatggaaaataaatacacatgatatactagtaaaacaaactaattctaaatattatttcaaatttggttggctttaagtgaatgtatgataaataaaatgaaacaggttatttgttcattaatttcgaataaaagaaattaaattgaaattaaaggtgattaagtgagttcacacccactaaatcacttctaattttgtctttttggcaatactagccttttgttggttttggtaatgacagcctcgaaccagtgacaccagcgacaatgatttggataccgactatcagtattgcgatagatatcaatatacctgctataacagcaccccatattggagacaccattattagtatggctattatgatgctgaatatacctgctatgataccgaatactcttgatcctccgtgcatggatctgccagccaagctatgaactattctagctataccgtcacagaacagtgcaatagcaagtacaaacagcaagaatacagtagagcctagaggatatgccacaacaatgcctgcaactataaggacaataatcccaagaccaattgtaccccacctagatgatcccggagctggactgaaaattccgattaaaattctttcaattcctacaaatatcaaaactatgccaagtatataaacaacagtgaaagttgtgattgcagggaaaaatagagctatcattgatccgacaacagctattattcctaaaacaatctgtactgcacgcatccatcctggagactttgtttcagataacgtcatacactattgaataatgtctgcttatataagggttaaataacaagtaacaatgttaatgttcttttatattgtttatctgcaatatatggtgccgatctattcagttagatagtaaattaataatcattgtactactgccatttaattttattcataatatggatcaattgtcaataataaaattcttttttcgtggtcctttatggatctcgatatttaggattagaaatgggtaataaaaaatagtgatagattcttatggatttaaattcacctattttctggataggttgtttctatagtccgttttgtctataatagtctatgaaagtcaagaagaatcataaccaagattacagaaaacggaccaaaatcctagtcataccttttaaaaaaattaacagattgtaatggcataataaaatatacagtattgatagaattagcattctaaacaaagatacagaacaggtatcaaaataatgaaagtgatcgattaatgtactacaaatggagttatttaaagagcaaaaggaatgtgatttctattatccatttcagtttagtgataaaaacaacaagataatcacagcaaaagtaatcaaatagaaggtatgcaacagcaaattgttcataacaccagtcaatcaggttggacgaattattccagtagtaaatctataggtctaattaatttggttcatagaaataaacaacacaatttcaaattttcaatgtcataatctagatttcaaataagtaaaaatgatacgtagaatatgattgcttagcctgtttatacaattgatactattataaagtaccatttaagaataatttatgatgtatattatattcatcaacaattcatcgttttctcctttgtaaaataaataaagtttaatacaagagataaggatcgaatacctagaaggtaattcagattaatgagatagcggatgcgaaagagcatagaggatacttttcagattttatccacaaggaggcaagttaaataagtcgacagtataataacacgatcttttaagatttggtattttaagtcaaggaaacatcaagacatgaattgtcagctagaatcatttgataagaaaatacacaaagtttttctaaaatgtatagttaaaaagaagaaattacctggataatattattgattagatacacatactggctttctattactaatatttatgtatctcgaccatgggaccaaataaatatcaaatgaaagaacgtgtttgattcggtttagtgtttatgattaatcgaattaagctataataattacggaatactaaatctcttgtctgagggttttaggaccatctattgtctatttctattatatttagtgatatcaggacctcaatggaacgctttttggatgtaatgaaacaattagactatgtcaatcactctgtaaaagaataattaactaatacaaatacgcgaaataaggccgacttattgtgttattaaaacagtaatatcaatactttacttactcaacagaaccaatttcgagacacaatgctttttataataagaagcatactaattagcagaataacatgttttctaaaattttagttggtatagatggatcggaatattctagaaacgctgttaattatgctttagatcttgctgtaaaagatggatcggaattatttcttttagcgattgttccttccaaagttcatcatggtgacgcatcaggagtatttggtatggtatctccatcatattttgatgaatataagaaggaagctgaaaagtggtttgaagaaataataaatcacataaacaaagaaaccaccatagataccagtactaaagtcaaatcagaagtaattaccaccccattttcaactccagcttcaattctaaattatgcagaagagagagacgtcgacttgatagtaattggtactaggggaaactcgggtcttaaaaaaatgttacttggtagtgtagcttctgatgttgttacttattcttattgtcctgttttagtggttaaataaaatctattttaccttttataggaattatacaggcaatagtataatctagattaatagtatctatagatattaagatcaaaatattttattgagaacgacacatatgaaggatttacttatcaaatcaaatcaaatcatcttgatgtaatttatctaataatggtctcaaattaatgccaatctctttttcccctaaaattatgttggaaccgagacccaaaactatagacaacatattcctatcttctctagcagtgtaaattgaacttccaaatatcttgaattcaatatgattgtcatgtatccattgcttccattttcttgttctttgagcattttgttctaatgagtttatcacataatccaaatcaattccctcttcattatcaagtaattgaagcttaaccatagggagcatgacattgccacctttcactgattgtttttctttattcatttgttctatgattttatcttcaacttcatgagcgtcttgtgactcatccttatccttataattgtctacatcaatgtcataatttggaaaaaaataacctgtcaaatttttatcccaatcgtatattttgtacactgtatcaatgtattctaatttccacagtggattgtctctatttccccttccaaacataataatacaaagtgtgagttgatatttttatgttgataaaatagtataagcattatttctaaagattttttgatatgaaaatgaggcaaatgctctattgatttctaatacttcttatattgtatgatattaaaaatgtgaaatccagagcttggttcaagcagaataacatttgattttacttttaggtaaactgcagttgtcgggttcttgtataaattctaaatcataaaaaaattggttttgttttagactttgtatgactgtagttcgcttaaactaatttttaaaaatacttcagcgccattgtatccctcgactttatcttttggtaaactatactccttgcgatctccctgagacgtaattattactgaatcgtcatttacagcatctacattccctgcatcttcaaagtcttttgatctcacatttttatgtataatactttcccaatcttgtatcgaatctgccatattaattcaacgtatagtcattgacgaattatttaagcatttatttaatagttgtacgaaaaaaatattttataatatgtgtaatagaacatttcttaagcaagagtataaaccattaaggttaaattcttgacacttggataaattttatggtcagaagtatccctgagtcggagcgcattttggtctttcaaggtggtgggtcgcttggagcttccggagcaggagcgtacaaagggatttatgagctgttaaaaaaaagataacagtaagtcaatttacaacaaatctacattggacataatcgctggttcctcgataggtgcgattaatgcaaccatactaacaagtcatgtaattgagactagttcatatgatggttcagcggaaaaattaattgatttttggcactatctttctaaggaatcgatggtcgaaaaaaatccttttttcgaagaatggtgggatttttggcattcaatttatagccatgtagcgtcaggagaagctgccagaagggtactactcgtccaaggaattttcgctatttggcgtacccaacgtgttcactcccatgacaccacaatctgacacaaagtattttgatatccagaatacatggtatagatttgacatcaagcctttaaagcgaagcttggagcgatttgcaaagtttccaatagcgacgaaatgggaagacggacaaacaaggctcttattaatatcggttgatgtcgctacctcttatcaggctgtttatgatagttataaacgaaaggacggcaccagatgttctgaatatggtaggcaaataagaaagcatgatggcacaacgggatttgaatatgttatccattatgacgagggcatcacgtccgatcatgtcattgctagtgcagcattcccagttaactttgattatgtgaatttgaatgttcaaaaatatgatgtttctcaacgcaatcagataatctctaatgaaacaaagattgacaaattagaatctaatgagtataaaattcagcagagaaaattctgggatggcggcttgatgaataatactcctttgatgagcgccatccagaaacatagagactattggtattatacgagagttatagtaaataatatccctccttagggatagatatagtaaatctgcatccgtctgtacaagaggagatccccattgatcatgacggggtattaaatagaaacaacgatataactttctcagacagatccattacagaggagggatatctattacttatttcagactatgtagatttagttaaacagtttatagatttgttgattgaaacaaggataaaaaaagaaaaaatagattctattttggatagcaaagtaagacctcacggtatgttttctaagataagaacatacagaaatattgtggaaggccgattcaatataacagatgtaatcagaatagaaagaaagaatgatgaggatacaatttcaaataaaacatacgatttctcttctaagacaataaacgaattattgaaacaaggttattttgattcgattgaatatgttaagagaaatcaacaggacaagaataaagacgatataagcaagtaagaggtacaatttggaaataatgcttctaattttcaatcattcaagtcgaaggttttgattttgcaaaaagaacattcagcttatcaccttctttaggaaagtaacctatatagttactacaaataatccctggtcttccttctaaggtgactgtaagatttactaccacagttaagctattcaccaaatttcatcttcaatcatttatgtattcatgacgatctctcaacttgttgacttgtcggatggagttgcgaagagtaattctattatgtcaaacatcatcaaactaggtgcagtcagctagaaaacatgtacaagccgtaatcaatatattcagagatcatcttattatcagacagactagaaacaaattaacatcggggcttgttactctatagttaagatcatgtttttaaattactaaagataaatatgtggatgtttcaagtctctgctgggaatcaaactttcaacctaggactcatagttgttgatatgcaaaacgggtttgtaagcaaaggaggatcttatgatcttttaggaatgaatacacaggaatatcaaaagattatccccaaaaccaaggagctaatttccttttgtagaagtaagggtataccaatattttatacagaagctgttagagaatcaagtggtattgatctgttaactcgagttcacaggttgttacctttagcaagagaggaacgactcaaagttcctataactgtaagaggcacatgggacgctcaaacaatagacgaaatcaagcccacagaaaatgatcatattgtcatcaagagaagagatggcgcatttcaagatacagaattaagggtttggcttcaaagtgaagggatcaatacattgatcttttgtggagtagatacttctatatgcgttgaaacttcattacgagaagcattcaatagtggatatgacgtaattatcgtatctgacgcaactgcttctggaattcctaagcactatgaaacaacactagaaagggtacgagattattacggtttggtagtcgatgtagagcgtttctataaaatgatatccgctctggaaaatattaaatctggtcaaattagcggtagccaattatcagatgcatacggtaaatttcttaaagaattcagtttacttgatatcagaaaagaagaaaattaatgcacaaagtaattttaataggatttagatttccatgagcgagtaaatgattaaggaatgacgaaattaatagtaaatggtattttcttctagcatgagcgggttcactttgatggataaataactaaacttcaaaacatcgccaaataattttactgtctttaggatttaagagtactacctagttattccccttaatgtacgcagtccttctgatattactagaatcttctcaggtttaagaccaatgttgatacttcttttctcttttctgcgaaataattacattactggtcaatgcttatttctggtagaaattaatatagttaaaaaaaattttggactattctttctaaatattctttctaaagtcagttactggcttaccatttatcattacactcatctttttatcactcaacctattcctcatcataaattcaagaaatcttgaaactaataatttcgctaccatgtaaaagacaataatttagaattcaaaatgaataaaaaaatggagttttaggcgattgcctttctaaagaaatgtagggcctaaaagcgaggtgtagagtatgtagtttcatcatcaattttataatgtgtactctgtattgtttatgtaccaagtatagggaacaaagtttatctttttccatatgacaagaaattaccaccacttctttgatctcacgtttatcagaaattgacatcggtatgtcatgggttatctaagtatctttttaggttagatcagactccagtttagcactggcatgagcttctgtggtgattataggtcgtaagaatatcagacaagtttgaattgaatttctcacaaaggtattttgtgatatcgatcgcagatctggatcacttaccacattgagtaatatctaggtcgattctcataaagccatataagccataaagaaaatatacatcgcaataatacacatgactttcaataccacatagtatgcaatatttagataaaacaacactgagtatgaaggtaatcgattcttatttctttatttgtgttctcttttatttttcaattgatccacaagaaaagttgcaaaggcgcctgctgccccagcaatcacaagcgctatagcgtcaccccatatcccccaaaaggcgataaatgtttcacttgcagttaaaggtggtagtacagtaattgttaaatttgctttactagttatatatccaattgtaggatatttcttaggtatatgaaactctggatctccaattccagtaactgtatcattaaacataggcaattttgatgatgtggtttgtttaacattgaagccaaaattggtatatcatatacgcctactggtgtctgtggggaagcctttaccctaaataatgggggatgaactctttcggtagatacattcaagccgtcaaaattgtaagatgggccgtcgtcaaatattatactagtaacattatcagaaaggggtgtttcaaattcagaaggaaccagatcctcgtctccttgtcttatgactaaatcctttggatttattaatatatttattgtactgggcggaacagcaatccattttataaaatccctaactgcatttgattggaaggattctgccgtataaaacgacaaaccataattgctgggataatgtatggaatcaagatccaatcgaaggttaacatgtcctggacctattgtagaaccatcaaatggtatagtgtaattttcattagagtatacaagcgcacgggaactgtagatgataattggtaaagatattcgctccattttccgtcctttgcttcaatagaataatcataatttgctccgttatatcctgaattttcaggtagtgtgataatagcaataagcacaccatatcttacacttttatcaggccaactatatatcgaagcaatttgggaatttgatgttaaccaaaaggtattcaaagttttttcatcactaacgtaatttacggctaatatgtttgcataatcagaccccaaatgagtacttgcattgccataagtttgaaccaaatcactcctctgatactaatttccttgtcagagattaaacattcatcaaatgcaggagatacagcaaaagtttgggaaaataatgtggaagaaatatcgcgaataataatactaatactattgataataatacggctgtaaatacaatatcaaaggagaagaataccggaaagtgtcttttcataatttgcaaatcctgcaagtaaattgctacacattgaaaattgaatcacatgtaaataaggctttatcacactgcaaatgaaactaactaagggcagatatatttcaagaaaattagatttgaaacacaaggtcatctttatccttttccacccatttcatcgattcactagtttttggtaattctttactgttaaagagatttagaacttaaaagtatatgtataaaaaagtttgaatgaataacaaatactaatctactattgacaacatcctgaatctcgtgctatttgatttgacctgttgccttgcatagacaatatttgatgtacatgaaataatacgaatagtaaatattagagtttatgaagacaattctgcaatattttatagtatcttctttccttaaaagaacacgaacttgataggctaaaaatacaagaataaatcaaacgaaggcttgggattagacaatctttgttgttacataatttagaatattagaaataagtaatccttaaagaatatatcttgaatttctaaatcatgcgattttggtaataagggattacttcttaggttaacaagatctggatttatttgactccattcgagatagatcattttgtattagaattattggtaaggctatctttttgataattaatgttgaaagtcggtaaggaatctagttaatacataaattaatgtaaaatattacaagtaccgtttttaaactcatttattctatatttggtttctataggaaatatttgaaccaaacattcaatggggccagagggattagaacattgctagtagaaggggtcaactaattcttgattaataataatttaaaccaaaatttcaacaggttattcataatgagtatggagaggatgggatttgttcacatgtcagatagtcatgggtttaaactaagccaagttttgtatgatatgattaaactgaatggaaaatcgctaatccgtaaatacatcttgtttcatgactatttcaattgtctattgatgtgaatagatatcaagtttaatttgctctttatctttcaagattatgctactatagtcggttactggcttatcatcaaccgttgcattcacttttttaccactcaagtctattcttccccatatattcaaaaaatcttgcaacgtataatttctctctgctatggagcccacggtaattcgtcctttatcatttgtagtgtataacggagccatacctggcatagtcttttcaccttcttcatccattggcatacccggtactccatacttatccaaagaatgatccttccacaaggatttatttatacctatttgactaggtattacaactggtttattgtcaagtatgatactcaagttagaatgaaaatagaccgcaaaaggatttacattttttgaggttagactagtattttggggttttatagataattcaatatatgcacttactatgatccctaccacaatcaaagcaataataaaaattagttgtcttttattcattcttggttatttatttaattattattctggctgaaagttcatggcattcagttctaatttgaaacaataaaatttaatgcatcatttgagcccttgaatttgcaatagacgaattatttgcctcctctgttgtgcgaccgttcgctgtagtggtgttattattattactagaattatccaggcctattccgctaatcatcgtcccaaacatttcattgtctcccgaaaaatgactccctgttttattaacatcaatcataaggcctagtacctttttgcccattagatgaactgtaatgggtacttggctgtattcaattccattatctgaatgaatatctgacgttcctgtaattacaatgtcattaccagcaaatattacattgtctgatttaaatttgttaattatatgattgtgagatagactaccatctggttttatcatcgtaaaattagctgtgaaatcagcagtcatgtttggggttcttagactttcatttattgactctttgatatctaaattccacattccaccttgaatccaggttacaatattatctttaatttgattattggcaaaatgaccatatgctttcacgatgctggtatcattttgttgggtacttgaggagttgtgcttcaccatctcgttaaaatttgaaggattatcggtatctgtttgtgcagtgactaagtatgactgtgtaatggaaggtacaaacctgctgttactactagagtctatcgacgaatatataataccaccaaccgcgaatcctaaaataaatattgacgctataaagtaatatgaatgactagaaatatacaagtgcaatattttgtgacttaacacataaaaaaatttcgccctttgtggggatttaatagtcaaagcagtcttaacatacaactgatattatgatagttaaatccttttatgatatatcatttctaatgaatccaaactttgcaatcacgttgatattcattatgatgttgtttgcattcagcggaatagctatgaatgatgactcggctatggcacaaacaaactcaacaactacaggtgattctgaaagtaatgcaaagatgcatgttgatgaagcattaaaggctctacagtcaaatgacaacagcggtgctacaatgcatctatacgtagcgtctaattctactacaggctctgcaaagatgcatgttgatgaagcattaaaggctctacagtcaaatgacaacagcggtgctacaatgcacatccaagaggctcagaaaaatctttagtaaattagaaataagatattccaatttgttttatttctattagtattttatttttaatcctcttaatttgtttaagattggcgagtcattcctaaattaaggtagttaaatttgatttacattcttttttattttgtctttgtcttttagttgatatgccattaaaataaccaatattatttcaataattagagttattataccatttggctccaactcatttattggtgtcccttcaggtgaaaatggaggagtgacaagtcttacaagtacaaaagtgatgacgagtattgaatttccaatgatgcctatgtaatagaggatatttctaagagtatactttctaacaagtaatagcgttataccaaaaactatttgggccaatccagaagccaaaaataccataccccatatccatgactcctgtgaatgttcaggaaccaaaagtacatgaataataccaacagaaacagatagtattgaaatcgctatgattaagttccttgatcttgttttattatcttggttatcaatacgtttttcaggcttgaatttgaaaataaaaagacccgcgaatatcccaagtgagaaaattcctagccattctgtgattggagatattatttgttcaattggattttcttctgtcatattcatactatcatcgtggtccttgaccatgttttcagacacaccttcactagaagcaagagcatattgaataccacctataattccttgacaaattgacaaacaaaatgataataccaaaataactaaacatgatgtcgtattatccatgctaatcttaatgtaagatctattcttttatagttgatgtctcttacttcatgagtaagacctttctcgttaattctctgcttcttttagattagcatatgttaaattgatcaaattacagcatgtatgactcgtctgtctgcttttcttgatgccaattaatatattttccaatgtacaagtataagaatacattatgataacctgaataaataaggaaatagatacttcttaatacaatgaaaggttcattgaatttttcctattctggtttatatcttcctagcaataaggaatttgtaaccactgttactgagctcatcgccattgctacacctgcaaggattggaagccaaccaaatactgaaagtccaaaaacgggaactagtgcaccagctgcaataggtatcaatccagtattataagcaaaagcccagaaaaggttttgttttatttttgaaacagttttctttcctaattctagagcagttattacatctcggatgtcattcttaatcaaaataatgccaccagtttctttggcaacatctgttcctgatcctatggcgattcctaaatcagctctagctaaagcaggcgcatcattaattccgtctccgaccattgcaacaactttatcttgttttgtctttaaattagcaacaatctcttccttttgatttggtaatacctctgctattaccctatcaattccaatttgggaggcaacagcctttgcagttctttcattatctccagtaagcattattggttcgattccttgattttttaatttctctatcacctcttttgctccctccttgattgtatcagctattgcaattattccagataggcgattatttattgaaaccaagacggcagtcttaccttcttgttctagttgcgaaagtctagtttccgtgtttgcatcaacagatatcttattgtcatacatcatttttctatttcctatcagtatgttttggttgatgtatacagcctgaagaccgtgtcctactactgcttcaaacgaatcaggagagactattccgataccttctttttttgctttacctatgacagcctgagccaacggatgttcagaaccagattctgctatagcagctagtcttaatagttcaaggttatccatttgatcaaatgctattatgtcagtaacagagggttttccttctgttaaggtgccagtcttatcaaatactacaatatttactttgcctgctatctctatatgttctccgcccttatacaaaataccatattcagcaccttttccagcacccatcatcaaagctgcaggtgtggccaatcccaaagcgcaaggacatgctattatcattacagaaacaaatgccagtatagagtaggttaatcccgcatttccaataaagtaccatccaagaaatactccaattgctattattattatagcaggaacaaaatacttggcaacctggtctaccattttttccagctttgctttacctgttttagcttcttccactaaagtgataatctgagataagacagtatcctgaccaatttttgttgcccttacttttaataaaccattcttgttaattgtagctcctattacttcatctccctttactttgtctacaggtatgctttcacctgttatcgcagattcatctatggaagacgagccatcaattattgttccatctgtaggaactctttcaccaggtcgtataatcatcaaatctccttccatgacctcttcgactggtatttctatctctctaaattccttggaaactaattttagccgagaactatccaaggaagtgctgttgctattatcacttttacttgcaatatttttttctcttatttcggctcttagtactcgtgcagttcgcggttttaagtctaataactttcttactgcattggatgctttttcttttgtctttgtttcaagcagtcttcctatcaagataagagtaattatgattgcagccgtttcaaagtatactgctgtaaatggaaagtatcctggtattatcgtaactacggcactataaacataagccgcagtggtacctatagcaattaaggtatccatatttgatgctttagctttaatgccatcccaaaatcctctgtaaaaacgccatccaatccaaaattgtattggagtcgctaaagctaaaagtatgtaattagtatattccatcatttccataggtagaaggtggcccagttgtggaatcatatgaggtagactgagtaaaactatgggtatagttagcgctatgcttattgcaacatgtttctttaacttttttaaagccatctcaggctcgagaaattcatttaaacactgagatgagcaaaaataataagtaattccatcttttgtatgatgaattgagctttcctgctcttctacaaacataccacaaataggatcttttgccatatcattaatagcagttagaacatatataacaacaaagctttacaaatgtaaaatacgaagaatcaaataaattgatagatcaaagaatatagtaatatttcaaattagtagagagatacttcaagcctacagattgtagatactcttttctctattttgaaatttgaaattaagatattaaactaagaggatgagataattaatattgccatcttatgaaaagactcatcttaaagttgtcggaatgtattgtacaacctgcaaacccattgtagaaaaacaactaaaaaataataatggaattaaaaaaattgatataaactatatgacagatagtgtggttgttgaatttgatcccactttaacaaatattaaagaaataaaagaaagtttagaaaattcaggttacaaattcgtgagagcacctcgttattaattataggcatgtgcctttagcattatattacaatatctctcattagcgataagatatggtaaacgatattcggatacatcgaagtagttaaagctttaaagcttagggtctatctccgtatagatatatctagactcctatatcgaactttacaaatgtaaagagtattatatcgttattaaccaaaaaagttgaacctgaatgcctctcagtcttgatgaaaacgatatatctattctcaattcaatcttagaagacggtaggaaatcttttagacagatttcaagagataccggaataacaactccaacagtaaaagccaggtatgaaagactcgtaaacgttggatttatcaagggtgttttaccagtctttgactttgagaaaatagaatcggatgtgagagaagaaaagaatttcattcaattagatgacctgaaagaaaatgctaaaaagagaaagaatattcacaaaagcactcagaatagtaatttaaaaaaagagatagacgatattcaaaaaagaattacaagtggtctggcgataaatattgtttgcgatttttgcgagggccctgtttttgataaacctaaagttctaaagtttgcaaatattgaaagattcttttgctgtacctcttgcaaatcagggtatagccaaaaataccgaggaagaatagaatcaattaaaaaaaaatatgagggaaaatctgagctgcatgagtaacgtctaatacaaatggtttgtatcaatatccatattttgaaggattttgctcgaactgttgtttacaattagcagagcaaagatataccttgtttccgtttatgtctgatacatgttttgcagttttttcatccacattcatattgcaaactgggtcttttgccatgtagtagaataagtaataatatatttaactatgagactttacaaatgtaaaaagctgctaaatttcaatattttacatttgtaaagctagcctgttatatttgactttaattaatatagttacatgataacacaaataaaaacaaacggtaactctcatgtacatcatcaacagcaaatgcaacagcaacgacacgaactaaaagaagagcgttatagtgtcaacctaaaatatactccaacgatcccagaagcaggacgacctactctaattactatagaaattatcgaaaagcaaactagaaagaggataaaggagttcgatatccttcatgagaaactaatgcatgtcataatcgtttcagaagatttgtctcacttttcacatattcatcctgtatttaatgtggaaagaggcatttttaccgtctatcatgtatttccagaaataaaaaaatacaaaatatgggtggattttaaaccaaagaacgcagatcagactcttgtttcattaaatcttgatactatgattggtacttacagtaaatcaatatccattactaaggaaagacaatttaccaagcaaatagataagaattactacgtcaatttacttattccaaaagaaattaaatcaaacaaaccagttgacttaacattcgtcatattagaccaaaattcaaatccaattaccgatttgactccattaatgggagctggaggtcacagtgtaataataagcagcaatctacaagaattcttgcatgttcatccaaccaaagaggtaagttccaactggaaaggtggacctgaggtttcctttaacactgtatttccgcattcaggtctgtataaagcatggggacaatttcagcatcaaaatgtaacaataacagctgattttgttttagaagttgtatgagaaggttgtcttactactatctaataacaatttaaatctcatacaacataattcaaataaaaccacctttttttagattccttttgtagatgttctctttaacatagcagctcccaaaattacgacccacgctaagaaaattatcatcgatattcctcgaattccttcaaagttaggatatgcaaaagcagagtaagaaacctcgattcctgccactattgtaaggatacctactatcactccaccaactcctatccatctgttgacaagtatgttctttgcaattgcaagaccaaagattattgcaacagtaccttgtaaaagtcgaaatacgctatttaccccatactcagtccagcgaattccttctgcaaccctaaagattagattctttttcttcctcctgtggagaagccatccaagaatctactgcaaactttaatgcaacaccgtctactgcttggagaatagcaaaagtacttgcagttattattgtaagagcgaatccaagccacgccaataaggatataacgcttgattcagaatttgcaagtaagcgatagatagcgacaaacccgccaacaaaaaccatcattgttccaacgaactgacctatatgaatccctacccagagttcactattggcatattctgctaatactcgtggatgattgaatggatcttcacctgaagggtgaatcatcgtagacaaaatcatgattactgctccagcaataaatgaaactgatcctaaaataagcacaggtctctgatacagattggttgtggtagtatctaccaactcagaaaaggtctcctttatttgcattcaatgtacagagcaagttttttattcctttaccttggagatatataatatttatgggaagcaaagtcaaaatccgagatcggggtattgttatgtatcattttcgaatggtcgggtatattataaaagaaattgaaattcatagaattcaataatcagttatggatgtatcaagcactaataagaggctaagaacgatgttcaaaatacattggcaagaattattagaaaagtaacagaattggctggctgtcctatacttttgatccattaagtagtttttaaataatagtcttattctcggtttatgaatatgatgtttatctataaaataaattacgatataaataatcatgaaaaatttaaaaaaaacttgagttgtttttgtaataccttctgttatccgcaacagcaataacacgaactattttcctttttttctattcttctgccgtcattttcttgacaacaattatctggttcatcttattcattatttttatctaatatgaacagatagttaaataccaggctttacaaatgtaaattgggtagacgtttagtattctttacaaatgtaaagtcactatcttatctatgttttcttgctaaggaaaatggatatgactacaatagaaaaaggcaaaacaatcggacacaagatttcaattaagtcaacattacaaaatctacaatggaggatagcataatgacttttgtatcttcctctccaagttcaatatcatcatcgatacccgcagcaaacccaaacaggtggaaagcattatcgatattatcattagctcaattcttaataatacttgatacgtcaatcattggagtagcattgcctaccatacaagaacattttaacataactcaaacagatttacaatggatttttaacgcatatgtaattacttttggtgctctgttattacttggtggaagactatcagatattgtaggacagcgtaaggtgtttactataggatttcttatcctcacaggggcttcagttttagcaggtgttgcaatgtcaaatgacatgctaataactgccagagttttacaaggactaggtgctgctttgattgctccatcagcactttccatagtaatgaatctatttgcaggaaacaaatcagaaatgaataaagccatgggtatttggggagcagctgcaccggctggtggaactgcaggagtctttttaggtggtattattactgcatggtttgactggccatgggtatttttgataaatgttcctattggaataatagttctcgctttaattcctaagttgatacctcggggaataaaaaagaaaggaagggttgactatcttggcgcactcaccatcaccgcatctttaggtctattgatttattcgattgttacagccaatgaaaatggatggctatccttacaaacaatatctatgttaggagcttccattgtattactgggcgccttcatcgcaattgagaaaagaactaaagagcctttggtacctcttggaatattcaaaacaacaaatcttctatcttcaaatattgtcatggttttgttgggagcagcatgggtctcaatgtggtttttccttaacctctacttgcaacaaatactccattatgggcctcttgaaagtggacttgcgttgttgccaatgacaggactcatcatggtgatgatgatatggctgatgccgaaattgataggtaaaataggaattaaagaaaatctcataatgggacttggacttttgactataggcatgattttgtttagttttactcctgctaacacaggcgaaaacaatagtaacaatttcatatttatggtctatgtattgccggcctctattatctctgcattgggaatggccttctcttacatacccatattgacttcagctgtatcaaatgcaagtaaagagcatgtaggtatcgcatcggggcttgtcaatactacttaccaggtcggttcaggattaggacttgcgattatggttgcggtatctacagcctattcagaatctttggtaaatattggaatgaatacattagaggccataaatagtgggtttcatctatcgttcacaggtgctgcaattatttctgcaatagctgcaattatatcaataatattgataaggacaaaaacgcaataagatgagactcgaagccttgctttaaaaacaaagaatctaccattccgatttaatgatatgaaatggaacaaatgggatttgtttacatgtcaggtagtcatgggtttatactttgataatgagtgtaggatttgtcctgcaatttcgacttccatatggcaatagacaaaacttgatgaattgggatgttttatgagcatcaataaactatcatatgattaaattttttactctacctttcctacagataattatagaattatatgaaaaggttatttgattgtgctattattggaggaggtcctgcgggtctaaacgctgccctggtattaggacgagcaagacgaaatactgtcttatttgataatgataatccaaggaatgcagttacacaggaatctcatggatttattactcgcgatggaataaaacctcaggaatttagagaaattgctcaccaagaaataagtaaatacccttctgtcatatatgaaaaggaagaggtaacttcaataactaaaaaagatcaattatttgaattagtcacttctgataacgaactttatcaatcaaagactatcatcatatccacgggcttaaaagatgttctaccagacatagagaatatttctgactattatggtaagagtttatttaattgtccttactgcgacggatgggaattgcgagacaaacctttagctgttatcatagaagaaccaacacagggttttcatttcattcagactatttataattggtctaaagaccttattgtaagcacaaatggtaagcccattctaaatcctgatcaaaagcatttgattcataataaaggtataaagattatcgaaagtaaaattaaaaactttgagggaaaaaatggacagatggaaaaaatacattttgaagatggagaaagcattattataaaaggaggttttgttttacctcaacctatacaggcctctgattttgctaaaaaattaggatgcgaatataattcatcaggtggtatttcagtagacttctatggtaggacaaatatccagggagtatacgcagcgggtgatgcttctatatttgctcctgcacaattaattatcgctgcggcggatggacttaaagcagctgcaggtgtaaatagggatttaatacaaaaagagtttttagaataactcgattgtaggttggtcactatttccaaatcctgtataattgacaatggatatgggcatgaaatgatctaatttttttgctcatattgaaaggaaaacgagtacaaacgtaagagcaatatcaataatctttccatacttgttataggtataatagagttttattatgattttattatttattatctaaaaaacaaatttaataatattaccttaattattgacagaaataaaaatacctgggaaatttttgtttgttctagatactagtaatcatattgttagagtttagacatacttgggagtaggtcgtgctaaaggcaaagaaatgtggagagcatctataaaagtttcagaaagtatcacatacccaataaccataatttcatggccatctttatttttcaactaattccttcttataggactttttcaaccatatgggtgttataattgttgtaactgcaaccattatgattattgcagtatagatgtctgtggatagcactcctgttgttactcccacaccagcaacaattaatcctacttcacccctagacaccatacctattccaactctcatggattttgctttatcttttttgagaaacaacatcgatggcaatccgcatcctacaagttttgtgagaacggctattgctatgattatcccagcgataatcaaaacatcgatattgatgcctcttaaatctacttgagcacctataattgcaaaaaacaatggtgcaaaaataaactgcaatttttgagcatactcttctacctgttttattagtttggtactagcaactgccattcctgcagcgaatgcgcccactatgggagacagaccgacataggctgcaacaccggctatgccaaagaatattgctgttgtaattccttcgatactaccccttgacctccatagtttttctctgtgtagaatttttgggataagaaaaatggcgctaattaataagacagcaaacaatcctagaatttttactattaaaaatgctatgtccattatttgcggcgaagtattccctgattgcaccattgtgagaacaacagataatattgctatggcaagaatatcatcaactattgccgcacccagaataagcctagcctccttagattgcattttacctagttcggtaagcacttgaatagaaatggctatacttgtagctgtcattgctgtagcaattaaaagtatttcaaatgaatccaatccgtacaacgaaaggatcataaagcctactgcaaagggtatgattactcctagtgcaccaacggtaaatgatgctgctccacctcttagaaattctcttggtgtaatctctaggcctgcaataaagaggatgacaatggctgctagttctcctatatacttgagtgtttcatcaaggacaaccaaaggttggccatcaaataaagggagaccgcctaaagcataaggaccaacaataataccagctaagagctctcccaatacaactggttgctttattcgctgaaatatctctgcaaaaattttagcactgaataaaagaatagaaatggatattatgatatgtataaaagcagattcagcagccattgtatactgtttttgttattattttcattataataatataacaatcttatctagataattgctagttgaaacctttattttcaaatttatagaaactataaaatagaataatttcagaataaacttttaggtatttcatccaaatcataataatagcctaatatgttatcaacagtatgctctaactgagtattactgtttatcagaacaaatataattttgtcgtattcatatatctttaatattctcagcttatcatattctaaaacaatccatcttatattacctaagatacttttacttttaccctctagttctgcattctctattgttaatttttcattttctgtgctaatgtttaagtctaattcattgacgatagaatcgacataggctctatttatgttagaatttttggcaatgtacaattcttttatttgagatgacatcacaataaaaactgccagaatatcatcatccacttctactaaatgttttattttatcatagttatcacctttattcatattaaggatgtctttcaataattctattctattatagccagataaatcattttaagatgattttatttggattcaaattagacccatcctcaatcgtctaattgctttgatgatgcatgttagggagattttctgaatgattggatgagagataaaaaatcacaacctctatatttaaaaatggctttaaaccttttcaaatagactgctggatgcataagaaatattcaattggtattttgttaattgcaatttacattgttgtactttttactgttcctcccttactatatgaaaggagtgtcaccccaattctagcgggcatcacagtaatcatggttgctatctatgttttgctcggacttgatattattcatcgaacagttatcgcaatgtttggagcaattctgtctatcattctagctatcgtactaggctctattcaggctgaagatagtcttgaatttgttatcgaatctgttgattttaacaccatcggtctgttacttggaatgatgattatggtagcaatcctgggagaaacgggtgtttttcatcaggtcggaataaaactcggcaaaattagcaaaggtaacgtttggatattgatgctgttactatgtgcctttacttccgttgcatcaatgtttgtagacaatgttactactattttactcatggttccagttacactttctataacacgaacgttaggaattcatccaattccatttattatggcacaagttctggtttctaatatcggaggggctgcaactctaattggtgaccctccaaatatcctgattggttcagctgcgggaattgattttaactcttttttagttcacatgggaccaacagtagccattgtttttggattttccttactcctaatcaaattgttctttaataaagagttaaaaggtgaacaaaaattagaacagcaagaagatatccaagagttaatgcatagagatgaaaatgcgatattaatacatcataaaggattactgataaaatccttaattgtattagtaggcgttatcgtactattttctttgcagactatcactcatttggaagtatccatcatagccattgggggtgctgcagtattattaatcataagtagagtgtcactagaaaaaatcttgcatgaagtcgattgggctactctgttattctttataggtttatttgttatcgttggagttgctgaacatgcagggttaatagatatacttgcgaatctagctatcgagataacagatggagatccttggtcgacttttgttctggtaatttggttctcaggtattgcaagtgcctttgtagacaacataccacttacaactacaatgattccgatgattcatactttaaacgctgaccccaccatagcagctgcctttggtcctgaaagtggatttcaatttagtcctctgtggtgggctttggcgttaggagctgactttgggggcaatggcacattaattggttctagcgctggtgttgttgctgtaggattaagtgagaagtttggacaccacatttctttttcaaggtggatacgcataggttttccgttcatgctaataactttggcaataggaacagtagttctatatggatttcttatgctaatacattagagagaactattttaattcctcattgttcattttagatatgagcatctatacaataaattatttcaatttctaaattatatagaacaataatctatgcatccaaggtaatgagcaaataattaattgaattactacctatgactgtcctcaatgggcatatttgaagaatctaaaatatactttggtcagtatgaatatattgaatctgataaactcaaggtctgatttatatgaagaattaaaagtaaaggttaaggataataaccttagaacaatgctttgatagcacagcaaaaatattataaaaatatcaaatcaaacaatggttaatagtatagcatccaaattaaagaaactaaacaattaatatctcaaattgacttcgggataaattcactaacgtatcataaaaaacatattcattcatttattagatcatatacctgagatttagagagggactgatgatacaaaacatcttagtaacagatgatggcacagaggtttcggataaagcacttgaaatagcttgtgaaatagctggaccatgtggtgcttgtattacattactgcatgttattgagcatattgaagatccggacaccatgatatttggaaacaatagagaacttattgaaaaagcaaaattaatgaatttaaggccgtctatggaaaatacatggcataaacgagcacaaaataagattaaaaagttaagtaaacaaaaccttcgatctgacagcaaatgcttaactggggatattgcagaaaaaatcttggggtacgctcatgctaagaaagttgacatgattgttatgggtagcagtaacagactgaagggtatttcaaaaataaaagcattaggtagtgttactcgaaaggtttcagaattggcagactgccccgtacttataattcattaaccagttcccctgttttatcaaatctgtccgtttgcaatacagcagtatagacgataagtagattatctatcgggttaagttgtagatacaaagacaaccgagttaatgtattaatagtctgatatcaaagtagcagtcattaagtatataatttgttttggtcccttatatcaataaattacctcataattttgtaataaggttttatttggtgccggggtttgtaatttgtggttttttcttagatattttcacaaataaatagattattgtaattatttcaaatctacctactatcatattaatgatgagaactatctttgatatgggatccatctccacagaagttataccggtggataatcctgttgtagtcaatgcagaaacagaatcaaaaagtgaatccaagaaatcctgtttatcgatataagagataatcgttccagtaataagtgacactgcgataaataatattactacatatattgcttcatcaaatattttttcttcttctttaatttttgttggctttgactcaatagcaaggtatctcttgttatatggtgatgctactgcagatatcgatccaccactattttctgagctgaattttttaccagtaactttttgaattatatgaagtattcgacctacttttataccacctgcagtagagaatgcagttcctccaattaacattgctattattaataccacttttgcttctatcgatatctgggcgatgtcaaggaattgaaaaccagaattagtcgcagcgcttataacatgaaatacagacgccattaactctgattgtacttccaaagttttacttaatacaaaataaaaaataattatacaaattaaaattattcccgtatacaaaaataattctgggcgaacgctggttgtatgcattttcttactaaatatcgcataatgaaatacgaaaggaagtgccgaaataatcatacctatcataagcgtagtcagttcaatgttgttttgtgaatctagggctgtagaagtaggagcaaatcctcctccggtaacggtcctaaaaatcaaggtgagagaaaatagtatatctgcctgtccgcctaaatataagaaaaagataagaacaattgcataaaaactaaagataacacctattgttagtatcagctgtcttactttgagatttccacccctatcattcctctgatgtgcatcaactttctttcaggatagaaaaaagcaactatcaagtatacgaaacttagaccaccaatatattgggtgtatgaacgatagaagtcaaagcttttgggtaactcttcaggaaatgatataaatgaaagaccggttgttgtaaatccagacgcactttcaaaaaaactatttataaaaagtgttaccggtccttgctctggtggaaacggatttacataaatatatgggatgctcccaaaaagactcagaagtacgaaacttgaaaccataagaagtgaggcctgtcgaagattcataggcattctttcgccgtaagaatttaatacgaaacccgctaaagacatggaggtaacagaaagaaaaattcctactgctgaagcaacttctcccatcaaagatgctaatatggcagggacgatgagcaaaaaacctgcaaactgcagtatgaaacctagattactcattataggcttgtaatgttctctgattattgttcgatatggcctaaatgtttgttccaaaacagacgtcctaatggcattagccaatccctcttgagtcacaatacctaaaatatgtacattatcggttaccggcactctctttattgcattgagtctcataagctccaaagcttgtcttacatttgcttttgcagaaatagttatgataggagaagacattattgtctttatagacactttatctgaatcctcacctcgcatcacaatcttatccaaaatatcgctatcggttataattcccatatattcatcatttttattctttacaataattgtctcagctttggcatcatgcatttgcttaacggctgtggatcacccatagacgaaaaagaatctaagagattttgtaatatactgttcatctgttgatacttctcctccaattctcttacctttctattttcttcctctttgatttcttcaaatgcttgaggtactagtggataggaacattttgaacaatacttattttctaatgggttcaccaattcacacctaggacagtttaatactgagggtatccttttaattgtctcttcagaatatatgccattgtattcgagaattttattttttaattcattgcccattcttctttttatatagcgagcaccttgttttgagttcatagaccagcgaaccttcttcttcaaggcatattctggcaaatgatcactatcattggtaatagcagaatggcgaatgcagtatggattccatcttttagtaacaagtaaatgattcagtttttcgatttctttatcgtcttttataaatccactgtctaccatagttacaattctttttcttaattgttgcatcatagtccataatgcctcaggattaatcggcgaaccatttactatactgcaaatgagactagcattaggttcatttctgaaaggatgttcattaagccaatctctaacatatggaaaagacaaagttagtaagatcggtctcgtcccagtttttgactcgaacggaatttcaccttcgccatatttttcctttaatctaatatgctttaacttcaacgaggttatatcatgatttctaccatcaaggtcccacataagggcaagtgctgacttgtttcttctgtgattttcgtattgtatcagtatcaaaatatcatctctttcccatagctcactttcaagatagggactgatccttttggtatttttgttttttattcttacaaaattgggtgtttcccattccgtttgttctgtatcattttctcgattgtataaccatctataaaattgctttattctattaagataatgattccaagttgttatccacttgccatctggatcttcgcttttaggctttattttagtatctaggaattctagtatttcgttcttagtttttatgtcaaaaaaacttctacaatcaaggaaatttgaaaatggaataattactcgaagattgtttaacttatggttatctgataagttgttcttattcatatagcaatagaattcttttatcagtgacgcattagacttgttgtcgagatgatctaatttgtcaagtaatgtcgaaagacgataaggcattctagtcattacctcttacatatttgaaatccaacaacaatagccaatatctagaacacaagttattcctatagttattttccatctgaaatatttaaccccatatgatcaatggggccagagggattcgaaccctcgaccgccagcgccccgggcttatacccaaaaattggatggtatcctgccaagctagacgatagcccccttgtttattaaaaataaacctctcatttttaaacctaagtatacaactaattgcagagaaattctaaagatacattttaataattagttaaatgctttatagcatatcatttatgctggttaatgaattagatgccatagacaaagaaatacttaatgatattcaatggtcttttcctttggttgaaagaccgttcttagaaatggcaaataaatatcaattaaaagaagatgaagttcttgatagaactcaaagattaaaagatattggaattattagacagataagtgcaatttttgatactcgtaagttaggatacaagagtgcgttagtggctttttcagtggataagaataagatagattatgtcgctaatgaaataaacaaacatccaggtgtaagtcacaactacgaaagaaatcatgaatacaatgtttggtttacgttagctgtatctccggatgcagatatgaaaaccgatttagatagaatggcctccctagatggagttttaaaatatagagtattaccaacgctaaaaatgtataaaataggcgtgaaattagacatggtaaatgatgatcctgaaaaacctagtcccacagacgacgtaaaaaaaatggatgcaaaagcagagaaaatatcagaagtagataaagaatacattagacaattacaaaaagatatcaaaataattagagaaccattcaaaacaatcacggataatttgggaataaatctggaagagctctttaacaaagttaaggaatatcaaaatatgggcatcatgagaagatttgcagcgatacttaggcataggcaagcaggctttacggcaaatggaatgatagtatggaatgtgccggaagaaaacatagatcaaataggattaaaaatcgcttcttttccgcaagtaagtcattgttatagacgacctatatacccagactgggaatttaatctttttagcatgattcatgctagaacaattgatgcagctgaaaaaatagcaaaggaaatatctgcaataattaaaattgatagatacagaatattgtttagttccagagaatttaaaaaagaaagagtaaaatatttcgagtaaattacggtttttttaattaaaaatttttaattatgccaataatttaggcatatcaaaatttttttcatacatttgttcgatttgcagtctctcatcttcattcaaataattaccatcagaaatttgagcaaacaaatctatttcttcaatgcttgtgacagttggtaatagaacggagatttgtttttgcgataaaatatacttcatagaaatttcagtaatatcccatccatgagaattagcaatgggtttgagtttttctattttttgcatcgcttgtataatccattctttttttctattatttctatggtcattcttatcaaatacggtatgttcatttactttgccagttaaaactcccgatgcatctggtactctaaccattatgcctactgaattatttctttgatctacagcatcaaaaaatacccttccaggatcctgttctaatatattatacacagtttgtaaacaaactatattcctgttttttatagcatgaattccttctttttcccatcctattgcaggccctaaagcaacaccgtgactcttaatttttccagagcttactaattcatctaatttgtgaaataatttatcgttttctatcgcatccatcttgggattatgtaaactatatacatcaataaaattggtttccaatcttttcatgctttctgacaaagcataatctaagaattctggagtgtgcttttggggaatctcgccatgtcctacttgctttgcattatacatatcataaccccatttagtggaataaattacctcattgcgcatatccttaaaggcttttgctaacaatttttcactcttgccccttccatacatatcagcagtttcataaaaattaattcctaaatcaaaagcatgttttagcatctttatagactcgtcttcttcaagtttttttccccaccagtctaaacctaaagtccatgtcccaaatccaatttcactaactttaattccggtatttcctaagttacgatatttcattaaattatactcctcactttttcagataatttattgaaattatcgtcgtctatacaaggcttactaattgactttaaatattcaaatggcttttcgggcaggtgattttcaaaatatgctatcaagtctggatcatgtgagtcaatttgaatccaggacttgcaacctacccattcaggtttgttaattaatcttaatgggttatttaatttgtatgctcgtaacaacaacaaataaagcggcttttttggattataatcaaatcgagatttgagataatcatcagtccatatatggaaattctctaatttttttaacgtagttaaatcgggcactttactaaaatgagttatctcaacaaatgatgtaatctcagttgttttatttgaatcaggcagagtttcggcactgtctaatccattttttctgtttaattcatccagggttgtatgatagtccatacggattgattctttagcttgatgttcaaaagttggggataagaaaaagttcttgaattttagttcaaagccgttgcgaaattccataatacctccttttctgaacgataaaatttgatttccagattctaaagctttgcaaactatagcccactcttttaatgcccctagaggatcggcgctggattttgattcattattaagactttgagtattattgacttgggctgagtttgctgctgcagcatctgaagaaatcgttgaatatgttctttcagaatcaagaccgattcttttcaattggatagttctagaaccagaacctataatatcattaaaaccattatctaaaaaagaattagaaatcatataaacaccagtttacaattgtattgttattataaataaatattattaaccactgatcttcgaataatagaatgcttttaacccaggctcttaattatctcctctatattttttaggacacatgggatcatcggtgtatctttaatgatatatttactaacttgagtttcacgtaagtctatgatcaagctctggaatcttgaaagattgtcagtttcaaaagccaacatgaaatcctgatcatcaattccaaatgaatatgtagtattaagtcgaatttcaggatattttcttccaactcttatatgttcttccatcatttcttttcttttctcaaaaggcaaaagataccattcccgagatttaataaatggatacactaccgcatattgcaatggctcctcatcagtttcaaatccaagtttaacctgatttgaataaaatgattttctagttaaagaaagatatgtggatgtaggttctatatattttcccagtatagtagtataaatttttgtagccagcacctgaatattttctagtgatgacgacatggtccaaatcataaattcactatcgtgtcttaaaccgatggtagaataagttctaattttcattttcttgcgtgcagcatttaataattcaagaaactcgcgcgaagcctcatctttgcccatctcatttagccaacgccatttgggatctactttataaaatgtaaaggtaaagaatttttcagagctattcttgttgtcggattcatcagtcttggcatccgatagctcaggatctttgatggatacagcgctcacaccattatcttttattgcattatctaaattatcaattttattttttttaataccagataaattatcaacttctgaagggcttttattcttgtttcgcatgacttgtatgctatcttaaattaataaatagtttaatacagtcaattgatattaatttttcaaaataacagtgacctgctgagcttagattagcttagtttagtttagtttatcctatcctaacgactgtaggatattagtacattctctgagacaaaataatagattgaataattctattaataatatcactactagaccaggattaatactaccattctcatatacgaattattcgtaaatcgaagaatgatttctctgggaaggatttatatatttcaggccacggttagcagtatcttttttattcgcaacctttttctttttatccttatccgttattttttctctaacttgatcgtctcttttactttccatgtatgtatttgtaggcccaaaagcagcagaatgtggctcaaagaatgtcccatgatccatcagatcattgttttttattattcttaccttctttttcatatggatcatctttttttcatatctcgaattacagattatctcgtttttactcctttgcttgcaagcggacctaagacgtcgtggttgcaacttggtataaccaagcaagagaggataataaacttactttaaggtagatggaaaaaatgaatgaaattatgatgatctcctattgtctattcgtcgtcgaccccgctcggttaagagtggttcaatgccggttttagttaactccgttatagttgccttttatacagcatctactgattcatcagatagtccaagccaagcatatcctttggactctaattcttccgatagctcctttcctgctgtttttattatttttccttttgacatcacatgtactttatctagttttttcaaataacgcaaaatccttgcatagtgagtaataactattactcctgcacccgtttcaattaatttattgatagcctcagcaacagactttacagcgtctatatccaatccagaatcaggctcatcaagaattgcaagatttggtcttaagaccaacatctgcattacttcagatctctttttttctcctccagaaaaaccttcattaagatatctacttaaaaagcttggatctagacctacattatcaagatttctctttagatattcgtggaattcctttacggttatgaaaacttctcgatccttttgttcggctgtcaaagatttactcaataaattataggcattgcgtaagaaatgactatatcctaccccagatacttcagttggatattgaaatcctaaaaacaatcccttccttgctctttcatctgttcttaaattaataatactttcattattgactaaaatatcacctgaagttatagaataacgcggatgacccaacaaaacgttggctaatgtgctttttccagagccatttaatcccataatggcatgaacttcacctttattgacatccaaattaacaccgttaagtatttttttatcttcaatattgacatttagatctttgatggttaagaatgacataaaattttatatgtcaatacataatataaatattcggcaaaataacactgttataattataaaatttatatatttagtataaatctgggttaattaattgattaaagtataataatttgtagtaattatttaaaaaaagaatacaaagaaaataaatttttgtgaaaaaaaattaagttattgttattgttcctttcatgaatggatgaacagtacaatggtaattatgttcacctggacccattttttctgcaggtacgctagctttagcagctggcattataatactggtatcaaaaagttttccgatttctgggtcctctggtccagttccgcttgtagccgtgtgtggaacggtatcctcgttaacccaagtcactaatgcatcactagttgcactagcaggatcaggtccataggcaggatttccttgtgttgatgaaccctgtaatattttcacttcaactttgttggcaaatgcagattcatctacagccgccgatgatgactctccagctgcatccgaagcactagctgcaggagctggtggaagttcttgtctgtaaatagaatcgactatccccgcttttggagtagctgcagtaaacaaataatatgcaattattccgactataaccgccatccccattagcgtataaaaagctcttttgtcagtcttatcagccatattgacaacaaattgtataaaacgcccttattaatttcttttacgattttatttgaccaaaaagactgtaatttcaaatttatcatcaaaatggaaaaagaaataccaatggacgaatccaaatgatatgacttttatttctgatttctgatatttttattgcaacaagagaatgctgaaggggaaagaaagaattaactgtagtatatgtaatgacagaattggtgattttaaatatgaagcaatgccacaatggaatatttcaggattcttatgtagcaaatgttattcaaaaaagatatcagaatactatataaaacaaaacccagaagaaaaaaaattaaagtaaaagcacactaagctggactaacctgggcgtggccggattggacaaagctgaaatcaaaactagagattcatgaaatttttaattaatcgactttacggatctcaacggccctattgttttcgattatagatctagcattctcaaaaggtaaaattgccacatcatctctttgatagggaccatatttattcatattaacgcctacaaattgctccatggaatctaaaaaccttataattacaaaattctgatttattgaagatacgatcttttccaaagttttcgattttccttcaagtagcatttttagtactatgttaattctttgctctctttctctatttccgaaaaacacgtatttttcttcatctgtaaggttagagtattcaaacatattttgtgatttcgaactattaaaaatttttttgcatcttaatacgaatatcaaagtcgttaatttgataaccaagtttattaaattggaattaatttctttagaaattttctccgtagtctcattattctctttttcattttgttcttttaataaagaaacaaggtttgaaatattttgataaaaattgtgagggacgggctgaggtccattatcaagatggatttctccttttaaaatattaaaaatttcatctatttttattaaatttgttggctttctatgatccaccagctctcacacaatttgtatacatgataagcttaattagaggtttttattttactatatcgaatatttcatttgccttataaagttatagatggaaaaattgaatctttgaactttaccgcagaacaaataatgatgagactaaaggatgaagaaattaaatttatagatttacagtttactggtttaactggtagattccatcatactacaatggcctctaatatgttcaaaaaagaagattttgaatatggattaccaaaattggatggttcttcaattagaggttttactgagatccacgaatccgatttgataataagaccagacccttctacatacgcaataataccatggataaaagaagacagaacagctagactaatttgtgacatattatcaggaggagaaaatagaaagcaattcaaaaaagatcctcgtggtattgcaagaaaggccgaagagtatgttagacatcaaggatattataattcattttggggacctgaagtagaattctttgtttttgataaattagaagtaaatacaatgacaccatatagatctcaaagttataatattatatcaaaggaagcgccgtggtcaacagagggtgtagggtatgcactcagattaaaagaaggatacctcccaagcgccccaggcgacacactaatgcagtatcgtaatgaatgcgtagatgttttgagtaataattttggtattatttgcgatgcccatcatcatgaagtagcaacggcgggacaatgcgaaatcgatataagatttgatacgttagttaatgctgcagattctgttcaaagctacaagtatattgttaaaaatatagccaagaaacagggcatgattgcaactatgatgcctaaaccaatcgcacttgataacggttcaggaatgcatgttaatgtgagtttatgggataaagaaaaaaatctattttatgatatcaatgattcatatgcagaaatgtcacaattagccagatattttgcggccggagtattagaccacgctcctgcattggctgcaatagttgctcctacaactaattcttatagaagactagtgcctggatacgaagcaccagtgtacattgcatggagtaccggcaacagatctgcaataattagaaatccagcccattataaaggtgaaaggtttgcacacatgaaaaggatagaattccgagctcctgatccgtcgtgcaatccatatttagcattttcagcaataatatcagctggtctagacgggataaagaaaaaaacatcgatacctgacccgatagatgaagatatttttaaaatggcaccacagcgcagacgcgaattaggaataagacaattaccaccttcacttagagaagcatacgaggaattaaatattgacagagaatttttaaagccgatatttgacgatgaaattatagattcaataatcttgcaggaagctaaggatcatcaagacgttaccataagaccccatccacatgagttctcgctgtatgcagatgtgtgaaatgtaggttgaaatggcaaccaagaccaacagtatgataaaacaaaggttaataacactggattaacacagttctaaataattttttggaggggttgtctagactggttaggatacctgccttacacgcaggtggtcatgggttcaaatcccatcccctccattgtattcacggaattacacagaatgcctttatctaaaaaatgagataagtatcaaggaatcaactaaagagacaaaaataaagagaattgcccacctatcaaaaagcattttcatcatcaacaatcatttatggcataaatttgtagtaaatgaaatgaattgttcaaatataaagataatatataaaaagtctcattgtaaacatatttcatgatacttaacttaaatgtcaacctgggtaatggttatgttcatggaatagcatcaaataatcaaaaatcttataaaataaatatacaggaaggttcagaaattcacatggttcttccagaagagttgcaagtaagttctaaagaaggattgattttttttacaactgaaacaggatatgatatttctctacagttaagttttaagagaatggaaacagatatgatattaatttatacagatatagatacgttaatgaagttagctaaaaatctccctattcagatggagataaaataatacaaaataaatatcttttttagtaatgcaaatacgctcatacactagattctataattattaagttatgtatcataaatttagagtgtattgggcaaagtaaactacaataaatcattctacctcctttcctgtaatttcgaataaatatcggtgaccattcctagttccgagatatttataatcctctagattctctattatatcgccatccatgatccattgaaaagttcttttttctttttcacttatagaatcatcttcaatacagactaacgtatcatgttgatctatgctgtaattgtaaccaattaccttggttcccttcgttaagagaagggtaaagggactttgctcattaggtccaggatcaaatctatgtacttttaatttcataagataaaataacgacctctcttaattattgtattgtcctaaacttaagatgataagtttgataatgatatatgataaagataattgtctgattaaattaaacagattttgtcattactaataagctaacatgactaatccaatgttacagtattgttaattcatatagatgaaaaaatgttgaaaaattaaatctgacaatattattcaacaatcatacaacatcaatcaacttgcctgtcaatgcgatcaaaattgattataaggcagtactgtatcacatatgtgtattaaagaacaatccagtcattgaatcaaaaaaaaatggaattctttaatttatatcgaaccctagagacaaacatggatgtaatcatagaagtcaaaaacaaaatctataagaaaaaaggaaataaataaagaatatggaagtaaccatttctatcttttgatcttactaattcattttagttccaaacaaaagaacataatgattctcagatagtaaaccatactctgttgtttccattgacttatttgatcgagtcaacttgttgagacttttcatgacttttttggttccattttccgattacaattgacattgaactgatcagtgcagtaatagcgtctaaaaagaactgcttgctcaaaccatcataaaatataaccttgtataagttaattaacgggtgagacctgatcatagaaatattctttggtaatatgagactatataactcgatatatgttaaatctagttctttcccagtaatttgactttcaatatttttgtccagttcaaaggttgttcggattataaagccatcagctaaatccttttgaaattccaaaaacaatagaatagataaccccgacgaataaggcaattgtggtgatatttgtgcctgaaattcgataccttctgttttattttcctttgtggtatcctttgcttcatggccccatttttttaaccaatcaattaattcataaaattttgattcttttaatttcatcaattcagttccatttttgcctgcgtctttttcaaccgttatctccttacttacattactagaggtagattcagccgaagtatcggtattgttcgatgtagacatcttcttaattaaaattaaaatattatttaaataatgatttcaatctcaattatgagactaactattagttcaatattataaaagaaacttatttgttcttatcaaagtaatcactcttactaattgaattgagggagaaaaaatattaagatctcctgtatgataaacatacagaattataagaattgatcatgttcttaattcgattcggatccgaaatctcttcattccaaatagtctattatgagactaataacatagatggagcatctattactcaggtaatatactgcaatcaaggattagctgtaagttgccatgactatttaataataatcttttatcggtttcgattctacatactgaaaattactgaatgtcaactaatagtatttttggatattcggaatattatggtagttaattggtaagagatactaacaggaatttctgttaaatgaaccgtggtttcaaaaaattgcaacctcgtaaattattcctgcaaagatttgaagacatattgtaagcctcattgcatctaggcaataactaatcaatgaatacttggttagcagatttgaattgaatatggaataagtttgaaggaattaagcatggaaagtaatgtgtattaatttgtactaatatttcattaatctgtactaattttttataaaatttcatataatattgaaatatttatataaaagaactgtgtaacatatttgatcaatatgggtaaaatgtctaaagaaatagctggacctggtgttgaaggtacagtacaaatgctaaaaaaagcatatggcgctgaattatctgcatttcattacttttggttcgtatcacagaatatagaaggattaggagtattgcatcagggtttctttgaagatagagcaaaggaagaattaggacatgcaaaaaaagttgcatttaggttaatgcagctagaaacacaaccaaccgatgaaccatcacaatgggaacaagacagtggcctcggaaagctacaaccttcaagatatttaacacttagaagtgcattggaaaaagcattagaatttgaaagggctgtaattaaacattataatgatttggcaaataatgtaaaagataaagaccacgcaacataccatcttgcattagaattattagatgcagagttggaagatgaacaaaacatagaagatattttagcaaagctagaaatcaaataaaatatttttcttttaatttttgatttaaaacaatgatataaatatattgtaaaagtacttagtcaggttgacggacaccatttctaaatattctactttttgtacagcgtgtaagattagcgtaaatttatcggatattaaatttgttaaactagcaaataatatggcgacaattgaaggcaattgtactatttgcggtctcaggttgatgaagggaaagattatgccaaaagcaggaaaaaatccactccaaaagagcaaaagaaaaaatagtagaagaaaattaagtccttataatttgttaaagtcgaagaaatgattctgaattatagtaaataaatggtaagaaaaacaatattatgttttgtgattgattttcaacaaataagttaattagccattattttctctttttctattggatggaagctccaaaccgataatgcccatcattgattcgcctatgggttcaaatatagttctgagagattcatcatcataatactttgctatatcagacaactttgattcgattttcttttgttcaatttttaataaaacatatctagctataagggccttaacctcgtctgctttatcttcctgaataggatgcttccctgatgaggtagaatttgatgtattagaggtggttttagtaggcaataccaattttattagttacttcctaatactatggggcatctttgaggactacgataggaccatatcttattgccgtctcatttaaagcaaaagtcatttggtcgattgagtcaagtattccatctgtgttttcgcaaatataggttataaaattgtcttcagattctttttcttcattttcatttatgagtgacgatgataataaagattgttggtggtcgatagtagacattagtatggcctaattaatccagcctaatatttaaattgtttcataatatagaatatcaaatcatgttctattaccattgccattaccaagggtacaacattatgttagaaaatgatagaattgtgggtatattcacatatcatcatcatttttgtacaggttaattaattcgctctttattaacacatttaataaccagttcataattgcatacaacgctaaaaagaaaatgaaactgacttttcattgataagttaataatttttttgaatttttaattagttcgaattttaattagttcgataatagttgaaatctcaattatcgcattgaattttttcaagtttctggtatcataagggttgtaatatggaaagatttagaactcgatataattatgtctaaattcaattcaggaggttgaattcgttgaatcataaaaaacccgtaaaattccatacaagatttgagcattaattctttctgctgataatatctggcttgcactaggatccatggaataattcataaatatttattcatttttgtaattttgttttgcaccgcagaccgagaccaaatctcacttttgaaaatctagatcaatattaaataaaacattatctaaagttagagcaaagttccaatgaaaccattggttgactttgaatcggtaagaaaggctacaatcatgacataagttcacataacactttttgtagcaatatgtaacaaaatcatgagtaggtcatccatacctaaaatgatgccttgattactgttttagtgacaaacatatctattgcatgtatattttcaatcaaacaatcaggtatattactcagaattttagatttatagaatcaaaaacgaaaatctagatcaatattaaataagtatttgagcaattcaatgatactactcggaagtcaatagtgcaaagaatttcatccagtcaaacctaatgtgatatttggggagtaataaggttacaatcatgtgataagtatcttctattgaggagtgtttatgactgaatgaaagcaatttcatccaaacggatttattgatgtttttgaggatacaaaaacatgggaggcaacttgagaccttattgacgccttcattactcttccacgtatcaaaatttaaggaaaaagggaggaaaaaattaattactacataaaaatatcaacaggtctgaataaaaaaccaaatagtctagaaatccagactattctattgttgacctaatgcgttgttaccatcatttaagtcgaatgacaaagcaacgttgttaccagatgccgcagaatccccatattcagagaatacttcactagattgtccagtaaactgaatctgtaaaactccttgggtcgagttgtttgatttaatcttttttgcaaaaacactttggttatcggtgttcacattcaatgcacctacaactagcagtgtagttgtagaagcaattaccactacaagaatcatcgatttaattttttattctagacatcttaattatatttcatatcaaataatcaaagtatttagattatcgagcaaaaaactgtaaaataattctagaacctacctgattttatatcctaaatttgcatgtcaaatattgcatcaattatttccttgcattttgcattttgcagtcataagctaaaatacttaaatcccattttctataaaaagatactaaacaaggaacagatcattaatagtgagatcatttttgggaaaataggaaagtggaatggaatgtgatataacataacaagaatatctagatcctcaattcattttctttattttggtaaaagaaaatcaagtttgtgtgtataaatatgtcatatcgtattagtaaaactttgtctgatattgttatctacatcaatctttgcaaaagggtagaagaaaatcaacgatcctctagtcaattagcgttactttcacaaatatcccactaactaaaaaactagtaaattaacttacaatatattactaatcattatactttggtttatttattttcatgatacaaaattaagataggatctgcttattgagtaagtaggtagtctcctactacaagttttaatgagtaataacacccaatttaccattcctatagtcttccattgcctgatatatctcctgttttgtattcattacaaaaggaccatatcgtgctataggttcgtttagtggaacacctgcaatgaaaagaaattgtaatgattcattagcatctttggatgactttatctttatctcctccccgtcattattaaaaataattacgtttcctctttttgcatgcttttcatcatttccaaaagtaccttcacctgatatcacatatacaaacgcattatagttactttgaagatgatgtataatttcagaccctgggtttaaggtaaagtgcaaatactgaatgggaatttttgtcctaattgctgattcaacgttaaaagcctctcccgcaattacctttacatgtccactatcctctaataatttgacaactggaatttctgaagaaggaatatcttgataatgtggattagtcattttatctttcttaggcaaatttacccacaattgaaatccgtgtaatctcccccctttcttactgaactccatttcgggcatctctgaatggattactcctgatccggcggtcatccattgaatatctccggcattgagctttcctgaattccctgacgaatccttatgttcaaaaataccctctatcaaatatgttaccgtttcaaatcctctgtgtggatgatctggtgctcccttggcttccccaggtttgaagtccattgggcccatttcatcgagaagtaaaaagggatctatatgagataaagaattggtaggaaatgatctattgactataaacccatcaccttcggtagtctttagactgtttattattttattaatagaacgatttttgttgataacttcgttttgatctgggtgttgctgttgtattttttccaccattttatttcgttaatcttgtatataactatagtagtaatttattacttagttagttattagtatttaaccatgattcggcgattttttggttgttacctaaaaccaagatacacgacaactaaatcggtggaatgtatttgataccgtagtaataataacaataagattataaaattttaatacctgataagctattataatttggacaggaagttctgatgaaagaagaaaaatgcgatatagtagatatatgggaggtattaggaaaaagatggtcactacacattctaaagaatttgagcactaatggaataatcagattcaacgaacttaaaagattgataccagacattagtagtactgttttatctcaaagattactggagctagaaagggaaggtctaatatcaaaaaaaatttattcagaaattcccgttcgggtagaatatagtttaacacctaggacgaaagaattagagaccattttgcaacaactaaatgattggataaataaatggaaagcatatgagaaaagaaaagaaatcaagagtgtgacagcgaccatatcaaaatctgctcctacatcataaagattatcagcaagttaatcgctgcgggacgagcaatcctttgatgtggtgtattttttgtaatatttattcaagtaatttaacatcttttcattattcctttatgaaatagatctttgtactaaactttatactcattatgacagtcgtatcgttgttaagattcattcaaaaacttaattagtatacaaaaacgatggtatttactgacaaaatcatgcatgaacgcaaagtcttgactttttgtactttaatgttaatcatcttttcttcaacattttcatcttatattcagttttcttatggggcatatgctaaagcccctctgtctccttatggccccaccgtaaatgacgataatcttacagtcgagaagataacggaaggtcttgattttcctacgagtatgtccttcattggaaacaacgatatattagtaacggaaaaagaaaccggtattgtaaagagggtgctaaatggtcaagtacaggaaacaccggcactcgacgtgtccgtagccaatagcatagagcgtgggcttttaggaatcgcagtatctaaacaaccggacggaaaaacatatgttttcttgtcctacactgaatccggtaatgatgcagacggtagtgatgttgaagacaacgtcgacccgtcaggcaacagactatatcgctatgattatgtcgatggcaaattgataaaccctgtccttttatttgatttaactgctattcccgaaaatgaaagaggagaacataatggcggtaaaattcgaattggacccgataataatgtgtacttcatagttggagaggtaggaggtcatagaactcaagctcaaaatatcgctgatggtcccgccccgaatggtctgggaggtgttttgaggatttctcaggatggtggaatagtcgaccaaggcaatcctatttttggagagggattgccgttgaatgtatactatgctatgggtattcgaaatagtttcggttttgattttgatcctttaacaggtaatttatgggacacagaaaacgggcctacagtggcagatgaaatcaatcttattttgccaggctttaatggcggttggtctcaggttcaaggctatttgaaccaggatctactagggcgaggaataacatctgaagatgaacttgtaacatttggtaacggcaaatatactgatccgaaatttgtatgggttaccacaattggagctacagcattaaaattcttgaattctgagaatttgggtaaagagtatgcaaacgatatgtttacaggagacatcaacaatggcttgttatatcgatttactctgaatgaggcacgtgacaatatacttataaatgatacttctctaggtaatgttgcagcacttgctgacaatcaggttgatgagaccaccgaaaatcgacctttaatatttggacaaggtttcggcggaataaccgatattcaggttggcccagacggttatctttatgtattaagttataccggtgcgttatatagaatagtacccttatctgaaagtaatattcccaaaaatcaacctgatttagcctctcaaaatgaaacacaaagtgcagactctatccccgtggtcattgctggattaaaaggtgatctgtcatattcacctaacccaattaacatagaagctggccaaaccataacgtggtacaatggtgattccatatcgcatactgtaacttcaggacaggataatgacggggatgagggtactgaatttgattctgatgcaatcatacctaatcaacattatagtctgacatttgataggtctggagaatacccatattattgtatataccatcctacaatggtaggcgaggtaatagtagaatagaataatcatttttagaaaaatagtatttgctttcatcagacatatttaaccctatatgaacatttattaaaactccaattcacatgatatctaatttgagcgcaaaaatcgtaaagaaattcatgtttgtaattaatgattgtttaggatatcaaaattaatcgactataatttatgatatatatataatatttaactaaatagaaatgtgaaaatctctgtatcgttgatttcgaaatcggttgtgctagttttcactatttatacttttttgtccttagttctagaatacgaagtacaagatgtttctagcacaatcatcaacgaatcttcatttacgtcgataaatccatctattttgataaatacgacaaaggtgtctaattgcataccgcaagacattatcgataacaatggtaacaataattcaaccgcattatccaagaccgaaaccaacaagacaaatgaagcaaatatcaataatgagactacaggtatttgtaaaattcttagagtatcagattcgatctcctgcactgaatataatggtaatcaatctgaaataccctgtgaatcaaacgattctgatgaagatagtcttaagatagataattttggagataacggtcatctattagccgacacaaaatttgatcaacaatattcatttgaattaaatgatcccgtgggtcaagacaaaaaattcagagtaactatggactttgataaacatgcacaaagcgagaataatgatataaactcacctcgattagagatagtaagagaagattcagaaggagtaccagatatgtctgccgcaaagaatcaggaaataatttggcacggaaacatacatgagtattttaaggaacctaaagataaatttgaaaatgaaacatacatatctcttcaatttaataccggacgtcacggaagcaatgacccagatgaagagcgtggctttggaacattgtttgatgtttccggcagtagtaatccaaacctattagaatatcgggatgatggcaagtatgtaaaatatgattttaatactacaaaggaattagcacaggacagttttattttccatcaattagataagaatggtaatcccatatttaataacaatctgacaaacaaagaaaatgtagaacttaaagtaagaacgttgttgacagacaaagatactagaatgatcgaaacatttattgataatggctcgggtaaggaaacgccctattggaccttaaataatctctccaagttaaaggaacaagatgatgttgatgaccaaaacggattcatggagactataaatcaaggatctggatatgttattgcacgcactgataacattgataccaggccctcgtcctttaagtcattttcttttgatttgtagtattctatctatcttaattttacgggctttggtttttcagctgataagataaaaatcaaataaggtcataaacaataattttttgctataggatgtattaatcgatcaagtaaccggattggtataatattcacattaataaaaaataccatatttagtactgattattcaaaatcaaacatctcgtcaggggaggcatctttacgatattcacccttgtaaaaataataacccttatcttgtccatcacaaacattgtttttttccgattgatttctttcatgaagttcaatcccaatgttgttattagcagctattttttcgatttcaccgcaatctaaccatatacctttacattcaggacatttatccaattccacgcataatccataggtcaagccatttcagaaaaacaatttggacatttcaaaatatcaaatgaatttctgttgatgatataaataaaatgatcctatcaattaaattcttagaataattattgtgattttataatataatataatttctacaattcatttctataatactggaataattgaattgataatccatatctattgctacaattagcttctgtaattattttcggccccatatcataataaatgtcaatcaataatcttatttactatagagacaaatttaattaatgagcgaatctacgaaatttaattattcgatagttagagagaattcaattaataatttcatcaaggatctgctagaggacaggattgaatttgattattcaaagggtattaaggaagataaaaatgaagtttttaatgcggctatggatttaaaggcaaaaataattccatatctagctgttgaaaaggactacgccaataaagaatatcacaagcttcaagaaaatatattttcttgttatctgaccctaaaaatttttggagtaatacgtccaaaattaagttaggttaattacctttcatgtgttttatgaaagagaataatatcatcacatgattcaactgacatagacagtttgtttttataatgagcatctgtacattttttgttcgacattaagtaatcaaaacttattttcaactctgattaaatattcctctaaaagacatacagttcaattaattggtacgtaaaaaccgaaactaactggatgaattttttgtgtagtagtataatcaataaataaatttctaattggtaatatttatagaccatatttcctgtatttaacattaaagtataagatttatttacagaatgttattatgactaataatttcattggtgttgaaaaaactacaaaaagttttttagataaactacaaaacaatcccggtccccctatttacaaattatcgcctagcgatgctcgaaatgtattatcaggtcttcaatcggtaccagttgcaaagcctgcagctgatgtacaggatctctccatctctggcaaatcaaatgaaaaaatagatattcaaattataagaccgttcaatagcggcgataaaacccttcctgttgtggtctattttcatggtggcggatgggttttaggaggaatagatactcatgacagactggtaagagaattgaccaactccattaatgctgcaattgtatttgttaaatatagtagatctcctgaagctaaatatccaaaagctctagaagaagcctatgattcaataaaatggatttcagaaaatggtaactcattgaatttagactcttctagaatggctgtcgtaggagacagtgttggcggcaacatggcaaccgctgttgtgatgcttgccaaggagcgtcagggaccaaaaattctttatcaggtccttttctatccggttaccgaagcaaattttgataccgagtcatatcgatcttttcaagagggttactttttgactagagaagccatgaaatggttttgggaaagctatgtttcagataaagccgatttgaaaaaacccacagtttctccattgttatcttcaatagaacagctcaatggtttaccaccagcacttgtaataacaagcgagtttgatgtattaagggatgaaggggaagcttacgcacataagttgatggaagctggcgtaaacgtaactgcatgtagatatcaaggcactattcacgatttcgtaatgttaaacgaaattgcaggtacgccagcaacaagaggtgcaattgaacaggcatctgataagttaagaaaggtattatgggaaagagaatagacattttagatactgtttagtcaatttttttgaccacaccatttctcattatttactgaagaaagaaatacgattgttttcaatagagttttgtgaattcataaagtacgtatatctatttaaaagactagatagaacatgttactaacattattgttattattttcaatattttaagtggtccaatgataattgtatcaaggatataatgtgattggatcggatttgattgaaatagtgtaatacccgtaaagctgagtaaattgatccatatgttcatattcagaattccatttgttgatgtctgtctgtctgtttatatgtctatgaatgtcatttttcaagtttttcaaacaggattgaaatcgacttgatgaatttattaaatatcaatacagtaattaggtagaaaacatattggataaagtacaaagttatcatgttgaacctcacataaaagaaagtaactacattagagatattgtttttggttttggtgatggagttaatacttctttaggaatagtagctggcataggtggtgcctctgtgggtgtggatatagtcattttagctgcggtaataggaatgtttacgggtgctaaagccatggcagtacaaaattatcttgctgttaaatcccaaatagagattttacaatccgaaatcaaaagagaagaatatgaaattgaaaatactcccgaggaggaaagaaaagagatagaagaaatctacaagtccaaagggtttgtcggtgaagaattgaatatggttgtaaataagattacatccaataagggagtgtggttgaaaacgatgttaacagaggagttgggtctgaatctagaaatcctaggcaatcctataaaaggagctattgttatgttcgtatcatttttggtaggaggcatcttaccaatactaccatatttcatagtcaaaactggcttaatcaacaattttacggcattcctaatagccatttctatgagtttatcgtcatcttttatgattggtgcaattaaaggtagattagctaaaaaaagctgggtaaaaggaggattggaaatgtctctattaggaacaggaattgcgttacttggttatggaattggatctgaaatgaataacctaggagtggttgactttgaataacagatattggtgttaaggcatttggtttagatatatgcaacagatgagaaagaatttaagaagaatatttttttttcaatttcttggctagttttggacctatttttgggatcatagatagttttgattctgaaattagtaggagatcgttaggtacgttgattccagccccatgaagagatcgcgctctggccctgcctatatctttcatctgtaccaatggaacaagctctgcctttactccatgcttaattcgactttcgagtgaaaaaagaacgggtaaaagatcgtttctgtttaacaatttacatatttcgaatattgaagagattaaccaattagacacttcgacaattctatgtatatcgcctggctctacaccaattctctcattcatccttttttctgtagactcattgatccattcgtatagagtccatagacttctagaacaatccattatttctacgtctgaaaaaaattcatcataattgttataaaacaaataactgaactcctcgatgtcttgttttctaaacgaaagtttaggataaaagtctgggcaagtggtaatcatatgaaggaaaccaaatacgttgttgatttttacagaccttggttttatatcatctatggtcttcctaaacgcaacagcagtctcaggattaagatataaatttgaaactaattttccaaatccggtcacattatacatattgttttgcaatcgaattagatcttcttctagaaaataatctaaagatgaatctattttatcaaatagggaagtattgttcctatcttgaaatgaataaaatgtctttgagaacaagtcatagatatcatctagactaattccattaaatgaagcaattacacccagtagatggattttgatcgctattagattcccaaggtttgaatttagaggttcaggaatccccaatatataatgatcatacaagtcttcataagatgttcttgaatctgaaataattatagattctccataagcatcatattgaggtcgtccagctcttccacaaagttgtttatattcaagcacactaataggaactgaagcaccgtatacaaaatcataccgggtaacatttgttattatgactctacgtgcagggaggttgacgcccgcagctagtgtgggtgttgcaaacagggattttatgattccacttttaaaagcctcttcaacaacccctctacttgaaagacttaatcctgcatgatgaaaccctatgccagtagatatcaaatttgacaaatttttagttaaatccgtgtcatcaccctcctccaaaatttgtttagaaacctttaaggtatttttcctttcttctggtgagagggttttggatacaacctctgaaaccttcttagctaaggatacggctcgttttcttgtttcaacaaaaataagattttgtccattactatttagagaatccatgactaaatcgatagccatcgaagtggtgtccttccctgactcagaaaccttaattctggaatcgtcattagaatatattatcccatcagaatataccccttctatcaattttgttggtctccaagtgctttctattaatcttgatcctaaccatcctgcgatttcggaggcattagtgattgtagcacttaagccaagaatctgagatgatgaatagtatttttttattttggttaggaccatttctaaaaccggtcccctatcttgatctccgattaaatgaatttcgtctgaaataaatagtccaacatttgataaccatgaagcattatgtctaagaatcgagtcaattttttcgtttgtcataataattatgtcagctgaacttaaatcggcgtttgaagtattaaaatcgccagtgctaatctttattcttatttttctggaaaatataccagatttatctatagaagtaaattccaaatatttttcataagctaatgctcttaatggtgtaagatatactactttcttatttttttctaaggatttaattgcagctaggatggcaattaatgttttcccgcttgcggtaggagtagtaattaaaatattagaatcttctaacaagcctttttctatagccaattgttgtggaggatatagagaggtaaaacctaaaaatgaaagataagaagaaatcctatcatcacttaacttcaattgcatgtataaattactattattaagaaatcgtattacatattaaatttctttcattgataaacaagctattgtttttaaggataggtaaggatttcatcgataaaattcttgcatgctccgggttgtgcatttgaaatcaattggcatttgattaactaaaatgaattgaaaaatgtttatgatcacgataattgacatttttcccctctggtggttattattatgatattactaataaattaataataattaataagtaaactttatattattaataaccaaattattttcatgcgagagaattataagacttggatctctttttgctttattgttttaaccataactttattttcttcaattattccaaagtctattgctaccagtaatttatcacaaaataacaataataataatagtatcaaagaatcagagagtcagagcttaatttcatcaaataatacaaatctaaaaattttctcatccttttatccgatttatgattttgtcaagaaaataggcaaagacagagtggatgtttcaactatagtacctgccggtatagaaccccatgattttgaacctacagccaaacaagtaattgaactacaaaaagctgatgtgatttttattaatggagcaggatttgaatcctggattaataagataggaaatgcaaacgtagtcgacttgagcaaggatctcccaattgaaaatataagatctactccagatccccatatttggcttgatcccaatttggttaaagcatattcaaaaactatatttgaaaaatttatatctttagatcctcaaaatacagattattatacgagcaattttaatgaatttaatagcaaactagaactactaaattcagatattaatatgaacttgactaattgtgatctgaatgattttatcgcatttcatgatgcttttggctattttgcaaaaagatacgggttaactcagcattcaattagtggtttatcacctgaaggagacattaatcctcaaaaaattacagaggcaataaaattagctgagcaattaggtgtaaacattattttttcagaagataatattgagcctagactttcagacacaatagcaaaagaaataggagggaaggtaatgagattgagtccgattgaaatgattacacaggaagaacaaactttagataaagattatttctcaaaaatgtacgataatttagataatttgaaaatagcgctcaaatgtgaaaattaattatttgaattatatagaatatgaaaaaagaattgaatagaaatgattgaaattctccagtatgagttcatgcaacgtgcccttatttctggaatagcaatttctataagttgttcgctaattggactgtttcttatattaaaaagattttctttgtttggggatgcaatgtcgcatgtagcttttggagggatcgcattaggattgtttctaaagtctaatcctatttgggtatcattaattgtttcgataattggagcattagcaatcataaaattgaattcaagcaaaagaatctattcagattcgtctatctcagttctattatctctagggctagcgatgggattagtattaatcagcttatctggaggattttctatagatataacaagttatctttttggaagcatattattagtcaatattgaagaaacattgagtaccatacttctaagcgttatagttattacatttgttatcttttattataaaaaattaatatatcttgtatttaatgaggaacaagcattagtaaatggcatcaatacagttgtattaaatattttattcattactttggcaaccattgcaattgtaatgtccattagattgataggagtactaatggtttcgtctctcttaataattcctaatgtttcttcgttgctactaggatatggattcaagaaaaccatactattctcaatttgtttttctttgatatctgttattttgggaataattttagcatatgaatggaatattacacctagtggaatgatagtaataacatccgctggaatattctttggagtaaatgtattaaagttattttcttcaaaaataaaaaacaagactgaaacaaaaataagatcttgacaattaatagtttttatcagctattacccgatattattatgtacttgtataaccagtatgtttttaaagaaatgaattttggtatgaaatttacgtttgtctttctttttgcttcatcacttttattttttacttgcttacttatttttgacggtatcacagtttttgctcaacaagaaaataataccaccactataaatacaaatgatcaattcggtattgaaaaaatatatcctaccaaatccgatggcagggaatggtatgtcaacatgtctaaccccaaaaatgatccaaatgtaacttttacttttaatcctagattagccaaacaggatgatggatcttggaaaataagggatgacaaaattcgaattaatgtagacacattaaatgggacagaagaatggaaaaatgttgaaattacgggatatgtgaaaatagactcgataatcaatccgcgtaaaagtgttataacagacattgactgggtagcaagaactgatcaacataatgaagactttccatgtcatggcctatcccttcacgggggcatttatccggatggttctgtagcatggaaaaaagaaatatggtttaccggaggatatactaaagaaaaatcagtccctaaaataaccgactcattgatgaatagatggattggctggaaaactgtgatctataatacaaataatgattccgcggttaaaatggaatcatatttagataactcaaattctaatcattgggtcaaagtttttgaaattacggataacggaggctggtatgcaagtagttcggataaagtattctacagtgcaaattgtggtagatccaaagatcatatggttttgaattcaggacctattgttacgtttcgcgcagataacgtagttttgaacttcaaggatttgagcataagagaaatagagccaccaaagtaggataatactgatttatccattggaaattactcgtaaatggaaaaaacaaatattatgaaatgatcataataaaaaacattgccaatcataagcatttcactgaatgaaaacataatccaagaactagataaattgcaaaagtttttgggtttttcaggcagatcagaaatcgtaagagctagtgttagaaacctacttttagaagagaaaaggatagatgaattgtcaggagttctacattcagttcttctagtaatacatgatgaaaaatccgatcaagaaatcagtgaaattcgacatggatttgataaaataattaatacccatattcacaataagatagacgaagatagatgccttgaaatttttgtactttatggtgatgcaagagagattaaaaatattaccaagaaatttcaagggaacagaaaaatggatcaagttaggttagtggtaacatagtaattcaacatattaatttgaaagccataagtgggatttgaacccacggcctaaggtttacgaaaccttcgctctgccaggctgagctactatggcggcagcgttagaaccaatctgcgatcaatttccaagtattagaagtatgaaaaagttaaataataatgtattttttttctatgatgtgacaaaatgcaacttacatgaatttttttttgactggaattgtaatgattgcaaagaagaatataagaatttgaagggaactaacgaaattgaagaagagtcacatgaggaagtagaacctatcaagggaaagaaaataaagaagaagaatgattacaaagaattcacagaagagagagctaaaaaactctatgaagaaatttttttgcagtatttaaaaaagggtaacataagtgaagcagaatccattgaacgctcaaagaagataataagaaaacagtgtttaatgcgcaacattgagccttggtcatgggtctaatccagattcagaattgaatagttaagttaaacctaaataacaaaaaaaagttatttaactttattgtcatcaccgaataatcaatctaatattttacaaggaagtgtaaataaagacatccttctaaaactaaaaggaaagagaactatcaagggaaagctgaaaagttttgatcaatacatgaatttaacactggaaaatgcaactgaagttttagagggagataaagttcaacaaatgggagaaatattcatcaaaggcgaaaacattgttattatagcaacagattgattatatgaataaacagtgattcttgttaataattataatcaagtttttcaaaagattaagttaaattatttaaaactacctcgatctttggcacattcaataatttccgagtcagatagatagttatcaatgctaaatgctctatcaaaacatgcagagatttcctttgaatgtttgttatcagtcttaccgtcattgtcattattattcttaatgttgtcgcttaaagcataattgtgaaggctattttgagaataactacctcgatctttggcacattcaataatttccgagtcagatagatagttatcaatgctaaatgctctatcaaaacatgcagagatttcctttgaatgtttgtttttgccatctagagactcacctaattcgctattagttggattagtatagatatttttgttgattgatttatggaatgactggaatgaataagggttggatactggttgattcatattttgctgttgtaaccccgagaaagttgaagggttggatactggttgattcatattttgctgttgtaaccccgagaaagttgaaggtttgtcttggggtggagacttgataaaggttgaaggtttgtcttggggtggagacttgataaaggttgaaggtttgtcttggggtggagacttgataaaggttgaaggtttgtcttggggtggagacttgaaggtatccatataattgccattagctgtatttgatgaatcagaagtaaaagtgggagtactaacgtcaccgtcagcagtatttttgctctgaaattcatgatagaatggattattcttacttaaattgtaaggattgctactagaggaggaggatacagaagtagtactatcaggggctttgtctggagatgaagaagatacagaagtagtactatcaggggctttgtctggagatgaagaagatacagaagtagtactatcaggggctttgtctggagatgaagaagatacagaagtagtactatcaggggctttgtctggagatgaagaatttattttattgaagttgttagtacaatcagaatttataccaataagcgcactagtcatcatgctcgtaatacaatcagtagtttgggcgatcaatgaattatcaggaaccaaacttatttgaccgtacgaaggagtaaatgttgcatatatagttgaaaacgatatcaataaaaacaccattagaatgggactgattttatttgctatgtgcacgaaaaaataaaacaatcatactttataatgagcactttagaatgctagtattaacttaacaatatatctattatacataaataagatagattttttttataaattaaaaggatgatttggtatgtttatgatgtgatcttagtctgttatagacttgttttatgtgtaaagtgttaggtgatacctcgatagaatcaattttgtactatcattaaaaacaaaattgtagttttttggttaaattgacccatattatatatatagataatctataataaaatagttgtttttgcctaattttgaagagttagtaataggcactgttatcgcatctattatcgcttttctaataaatctaattttaatgccaagttttattaaatttctaaaactcaaaggaaaggttgtaaatgataatcacaaaccaaataaacccaaggttcctagacctggggggccgatattattattaagcattgtcattggggaactaattttatatttcattaccgggaatctcgagatagtaagtattttacttactacgactattgccttcataataggaattattgacgattttagaataatgccgggatggtttaaaccaggagcattgattttagcctcaatacctctaattatttttcacatatatgataacgaattaaacgtgatttttgggagtgtgtttatccccatcctatacatcccattaatattaatatcaataccactagcggggaatacagtaaactcaatagacgtattcaacggggtagcgacaggattcatgattataacgatgtttccaataataattagtacctttttgtttggaaatctggaaattcttatgatcgagataccatttttagcggctttgttaggattttatatatttcacaaataccccagtaagatatttccaggagattcaggtacgctattgatgggagctatgtatggagcgttagcaattgcgtctaaatcagaaataattgcaatcatagcattattaccagcaataatgaactcatttttgttcttgagtagtgtaaggaagattgttgaacacagagaattgaaatctagaccaactatactaaatgaagattatacactacaggcttcaaaggataagaacgcgcccataaccctagttagattaattttgttggatggaaaactttctgaaagagaaatagtcatgaaaatttataaattggctaccttttcgtcatcgcttgcactaatcacaatattattacaatttattatatccagtggatagaataggaggagtaggaggagaaatgaattttttagatctcaaattctttatcttttttatgtgggtgctggtcatgacagcatgtatttttattatttttgttatagccccaatcagtaaatttcaaatagatcaaaatgattcgctatcttttctaaagacttcatttattcaggcaatattagcagttattatagttggaattttaataattgtactgaataaatttaagaaagtatatttgttaaaaaaactttcgggtaaaaataaaagttaatctatttctgcagtataaacctggattaagttagaaaatccctttttctctacaaaattccaaatctttccacaaattgaacatgttattatattgtctttagatgagtactctaagctataatggctacaacgaatttgatactcatatttgagcgactctaattccttaatcgtatctatatgcctgacagaattttctgtcaatattattacttagaatcaacataatataatctattaatcaagaaaattaatatagtttcaaaaaaaataagtgacctatagtcgaattcatatagatatagtaataatattgaataacaatataataaccattattattaagaatctatatatatcaatcgtatagataaatataatattgaataaattgaattcggacattagaaaaattcaatttacaggtagatccacatacattttatcattacccaaaaaatggattgaagaaatgaatcttaaagcaggtgaccatgtttctatctcccgaggttcaaacaattcgctatgtattactccagagcaggagaagagattacaagactcgacaaacgaagttagcattcaggtattgattgatgaaggtcccaacaccctaaagagaaagattgtttcaatgtatttatcgggatataacctgataaatctaaaagcgaaatctgcaaggattcaacccatacaaagagaggcagttagagaagtggtaagaagaagtttgataggaacagaaattattgcagattcctccgatataattaccatccaagttttgttaacactaccggaactatcagttaacacggctgtacggaggatgtttctaatagcttcctcaatgcatagagatgccttagtggcgttaaaggaaaaaaattatgatatagcgatgggagtaatcagatcggatgatgaagtagatagatttagtctctacatattaagaaatctagtcatgggtactaataatgaaagagtattacaggaaatagggttaaaaaatgcctccgattgtcttagctatcgagttactgtaaaaagtatcgaaagagttgctgaccatgcatcgagaattgcttcaaaatcaatggaaattcaaagtttgatccctcctttgataaccgagaaattggagaaattgagtaattctgctttggaggttttgacatctgcagttgaggctttcttaagaagagactacaatttagctgataaaattgcagataaatcagataacgttcttggtattgaaagagagataatgttgttcttggattcattagaaaataaggatatcgacagtcacaatatcaatgcgggagtaaaattaatacttgaagatatacgcagaactgtagaacatgcaagtgatattgcagaatcagccatgaatcaaactgtaggagagataattaaagtagagaaaaagggagagaattgaaattagatattggtttgtagtaaaatttgatttattttagaacaaaggctacagtgcatattgcaattgtcatgaatacaaatggatctaagcgaattacatacaaaacaccaaacttgtttatccatggaattaagaaaataacaattattataaatattatgaataaataataacattaattagataatagagcggaataatatgctattttaatattaaaaatattaaatggcagattcgcctctagcctttgttcttatgtctattgcctcctgcacttccgatatgaaaattttgccacctattttattactaagtgtatccaataaattattgactagtttatctaccccatcgtccctcacaactatttcaatttttgttctaggaacaaattccggagtgtattgcatagtacctctcccaattgaaacaggttcggctttagatattccttttccttgaactcgatagtgactcattcctccgatgttattatcctttaaaacggcaccaacagtttgtagttctctgtctggaattattatttcaatctttttcactattattgatcaaccatcatattttttatataacatatttaaaacatcaatgtgttcactgcattgcagtgaaatagtatcataaaataattgaaaaagataatatttataaaatctattaactatattatgggcatattactatatataaattttaaaagtatattgtaaaatagtaaacgaatgtagatcgaatgttctgatcgaaagacatgatcgaatggacagcttttaataaatacttgatctacaatgttctatttgataataatgaaatatagaagtagaacagaaataactgtcttaatactagaagcagcaaatggtggggctacaaagacaaaaattatgtacaaatcattcctttcatacgcacagttaaaagaatactttacaatgctaattgagaatgctttgttagaatatgaagatggattgttaaatatctatagaacaacagaaaaaggcttacgactattaaagatatataatcagatagaagaaataataccacaagttcattcaaattagtgacgttcatttattattacatagacaaactaaaactatagattttgataaataataatcttcgattcattgtaattattttatatctatttaaccactagtaccggaattttactatgatgtaatactcgatgagaaacactgcccagtatggcgtgtttgaatttccctctacctcgactccctatagtaatataatcaaaattgtttttctcgatataatcaattattatggacccaacattttgtccttccaaaaatatggtttctggttctaaaccatagttttttgttctattaacagcattttcaagaacaattttggcttctttttctagctctgccattatagagtttactagtttttgagattgaatataaacgaaaggagggatttcaagtacatataggactatcaattttgagtctaatttggaactcaagaatgaagcatgatctaaggatctcattgaattttcagaaccatccactggagcaagtattctggaattcattagatagtatgagtgaattcaatgatataaatctaatatttgaaatatgttctcataaaaagtaaataatataggaaaaattttgtatcttagatataaaaattaaaagaatatattaaaaaatgtctttattagaggtatttattgtgcttgggattaattcttctatctgattatatatctttaatagtcgtaagcctttttctgttgttctatacttttgagttccatcttcatattctaacaaagcattctcaattagcattgtaaagtattcttttaactgtgcgtatgaaaggaatgatttgtacataatttttgtctttgtagccccaccatttgctgcttctagtattaagacagttatttctgttctacttctatatttcattattatcaaatagaacattgtagatcaagtatttattaaaagctgtccattcgatcatgtctttcgatcagaacattcgatcacaacaactgacatactaatctatttcataaaaaatatgacatttactgatttcgagttccttaagtatgtattagaaaatcttaatgaattaatgttattaatctatttagctatttagttacgaatttgctgaaaccaaattttagtttattttactttggtataaacaaatattcaattaagttgaaatcgttgaaatcaatatgatatattttaacaagtttgtttttttcgaaaacaaggataagatatggtctctagggtttagattacgataattatttaaattacaatcaggcaatgatctcatgtcttatgggtctgctactccatcggagccttcaacgaagaaactagtattaatttttggtattattgctataggtgcatttattgttttgagtatttttgtatttcctattaaaaatttaatcagagacgatgttactgccgaggttaaaatattaagtaaaaatgaaggaatttgtgttgttgatactgctgatcatcctagaggtattaatcaatgtccctacgaggctggagatatagtaatcgtaaaatacaaagagggaacttcagacataataagtcacgaattaaaactctaaaaataaatatattatttggttttagttatttgagttgaattaaagaaattattttattgtgcttgggattaattcttctatctgattatatatctttaatagtcgtaagcctttttctgttgttctatacttttgagttccatcttcatattctaacaaagcattctcaattagcattgtaaagtattcttttaactgtgcgtatgaaaggaatgatttgtacataatttttgtctttgtagccccaccatttgctgcttctagtattaagacagttatttctgttctacttctatatttcattattatcaaatagaacattgtagatcaagtatttattaaaagctgtccattcgatcatgtctttcgatcagaacattcgatcacaacaacatagataagaaattatcatcctttagtgctttggataccgtatcagaagaaacagccatttttattatttgagatcggccatacctaccatggctaacgacgtttgaagtaattaatccaagttgatccaattcactaattatttgagtgactcttctttgggtcaaagaatcatgttcaatctgtttacataatgaagtatagatatcataaacatctccagtcataccagtttgagatttcatgatagatagaacaatcaattttgtatgtgtagtggaatttttaatgacctcataatttgtgtctttttcaatcttttcttgtgcttctcgaatatgattttcagtaaccatatcagccctttctctttccgctatttcagccgctactcttaatagatcaattgcctttctagcgtccccattttccttcccggccactgctgcgcataaattaatcgctgcctgaccaatagatccctcattaaatgcaagttttgatcgatcatttaggatttcttttaattgaattattgtatatggattgaatattatttcctcctcacttagactgcttctaactcttgggtctagtttgtctttaaatgtaagactattagatattcctatcaaagatacaaacccgtctcccaacatacgttcatttgctctagtaaagttatataaaacatcatctccattcctatcaaccaaggaatcaatctcatctataattaaaactacatgaagattatttttttttaaatattcaagaatcctatcagtggcttcgcccatagacaaaccagtaaaatgaacttttaatttcctgtcgaagcgattaatccctatatcttccgcaatatcatataataccttgtatgatgtatttgaagtctttgcgttaatgatagtaacggtaatctctattccatgctctattgattttttttttaatctagtaattacattttttacaacagcagttttcccagttccaggttttccaaaaactaagagattagaaggtctaccattctttaatacgactgataatacttgagcaattgttttagactcttcgtctctaaatggcaatttttcaggaacgtaatcgattgttaatgtttttctattcttaattaaattagctccaataacagccttatcaaatatattatctaaataatctgaatccatcatcatttctttccgttaatagtattgataaatcaacacagacacacccctatttttctattcgaatgataaaaagataatgtcatgttaatatgctaactgttattaacatttaattttaaacaggttaatcaattattttatacataataattaaataaattaatataattctactatcaaaatcaatattaattgcataagaaatagaggggcctgtggctttcaaacaaaattaacattaatcttaacagttaaaaataattagataataaacgtgaattaacccctttatttccactggaggaatctaaagttcattcacaacgataataaacgtgaattaacccctttatttccactggaactagaaaaacctttaagaggataatcaaattaactttagaaatatatacaacaataattatgtgcttattttagttaacaaaaactaatcatttagttatcaatttttattccatattgttaagttaacatatgttatcaaattcacagagacgataaattgtccactggaaaaaagagaataaaaattgaattagaggacgctgaaggtggaaaatataatttatctctagaaggcaatttatcaaatgacaaaattcaaaaggttcttcaattagtggaatcattgaacatctctaaggatgatttaaataataatatccaaattcctatggaacaaaataaaagtttacaaaagtatgacttaggactcaatcaatctaacaactctattggatcaaagatatgggcattgatcgaaaacaactttgcatttagttcttttacatcttcaaatgtagccgaatcctatgaagaatcatacggtgaacagttacaacttagtctcatatctacttatttatcaagatattttgaaaagcaaaaattagtaaggagtaaaagagggaaagaatggatttataagttaattagaattcaaaaagatattatttcgtccgttgggacacctactacttctcaattaagtcgtttaatggattcacattacccggaagatcagagtgagaatgactttttgaagcagaatgctttgacaacagtttacgaccttcgactgtgatattatacctgaagggctttgtgctcatatctctatcaactaatttctcttcaaataattttttcattaatctagaagtgtgttctctagtcctacccactaccctttgaacctccctagtagtcagagatttatcctctaatttctttaggatgtattctattgtactattctgacggtcttcttcctgatccaccgacttgatagagtcttgtgatggtatgtcgtgattaggaggtgatgtttcaatttttggattgcttacgtagttttggaatggtgatattacagaattctgtgacttgatcttgttgttggatattatattttcatctaataattttattaaactttggatatcgcttaatttttcattggtcttattagttctgtcatataagactctaaattgttcagaaatgagattagtcttattaatttgatcctttatttgactttcaagctgagagatttttgtttcaatattgtatttcttaaattttttgttttttaactgcttgtaaatttctaaagctagaattgataatactatagccgaaacaaatggaattaaggtataatttaatattagtgatgcaatatctatgctcacatataatttagtaatacagtgtgatataactttattgtatgtgataatttaacgtttaatattataaacttagtgatatatcacatatcaattattctattaatcaaatcttctattacatttatcacattagttatctctttatcgtgatatttagcgtgattgtcttcaaacattctaagtttgattaacatggagtttagaacggtaatttgatcatctttcattacatttattagatttagtagtaggatggaatagaacaatttccgcagttttgtctttgattgcttaacttctctgtagtatgcgcctgaacttatttccttcggcctcttctcttttttcttgaaattataaattatttgtatttgtctgttggtaaatagagatttttcaattaatttggaaagaaataaattatttatatcttctttgttttccatcagctatacgatattgtatagttaattatactattttaaataaacttagcacaatcattaaatttaattcaattagtatacgtgtagtattagattgagtcgggtagagaactatattaatgatgaattgaaaaagcataaaaaaatatgttttgctttattagattcggagaattttgaagacattgctggtgttgcaaaaaaagttgaatcacttggtgcctcagctattttggtgggaggttcgtctgccatagatcaactggatttagacaaattagtaatatcaattaagtctataatatctattcctgttattttatttccaggaaacgttacaggtgtatctcccaatgccgacgcgattttatttacatcattgctaaattccgaggatccatattttatttcaggagctcaagcactaggtgcattgttggtaaaaaagtataatattgaaccattgccaacaggatatataataattggtgataacactacagcttggtttatagggagagcaaaaggtataccttttgaaaaatctaatattgctgtcatgtattcattggctgcacagtatttgggtatgaggtttgtttacctggaggctggatccggcgcaaaaaagaatgtatctgcggaaatgatttcaaatgttagaaagtattatgatggcttattaattgttggagggggcattaagaattccttgatagctaaggaattagcagaggcaggggcagatatcttagttgtaggaacattattagaacgggatccggattgggaaaaaaaatttaacgacattgttatggccattcgttcctgaattagtgcaattgaataattatgaatttgattgatgaggccaaagtaagattaaaaaatatttcaattccaagttactatttagagtatcaaattggtttgctggaacaggtaaataagcttcatgtggtagccgaaaaagcaagaaagaaaggtttagatgttacgacttatgttgaaccaaaaattgcctacgacttatctgacagagttgcaaaaatgcataatatagatatatcagaccgattaaggacattactaaattatactacaaaagagaaagcagctcttaaaatagccgaggaaattgcaaagggggaatatggatctggagatcttaggacaagattagaaaatgcggttagggtaagtttagctgtggtgacggaaggagtcactgtagctccattacagggtatatctgacgtacaattgaaaaataacaaagatggttcacaatatctctccatttcatttgctggcccaataagatctgctggaggtactgaagcagcactaactatgcttatagctgatcatgtaaggagagtatctggacttgcaaagtatcaaacaaattcttttgatgatgaaactggcaggtttatagaagaattaagattgtatgagagggaagtagggaactttcaatttaaagtcttagataaagatgtcgatttttgcatctctaatttaccagttgagatcgatggagtagatacagacccagttgagttagtaattcatcgggagatgaaaaggataaaaacggatagagttagaggtggagcactcagggttatgaacgacggtttgataggcagatgtagaaaactcacaaaattggtcgaaacactcgagttagaaggttgggattggcttgcaaatatgaatggtgcaatccaaacaggcgatgatgatactgtgagtcataggatgtctgaagtaattacaggcagaccagtgttatctatgaacaagaaaattggtggatttaggttacgatacggaaggtgttttaatactggattcgctacgataggaattcacaacacgattcctgtactattgaattctgccgtagtagttggaacacaaattaaaatggatgtccctggaaaagcttctacaatcgcccttgtggataccattgaaccaccaatagtaaaattagatgacggaacggtcttgcagatcaataccgtagaacaagccctaaatttaagatcacgagtagtcaaaatattatacctaggagacattctgattagttacggagattttcttgagaataatgcacaattattaccagcaagttatgttgaagaaatatggacccaggaattatttgaaaaattgagtcacatcaatgaagtcaaaaatgactttgttgttgaatatgataagtttgttaaattgagttcgaatccctctacaatacccctatttagagaggcattgaaaatatcgatccaattcgacattccactacatcctaaatattccttctactgggaagctatatcaataaaagattttttaataattagaaatgtcttgatatcttttatttctctatttaacagaaacggagagattgaatcaactaccgaggaaattagtctatcatatgatcataaactaaaaagtattctagaaaaactaggcgtgttccatcgtctagatacatctagtaatactatagtattgttagatgggtctcaaattattgcgttagtgtgtttatgtattcctgaatttcaatccatactctcattcttatatgaaaatcgcgataaaatccatttttcaacaatttctaattatatatcaaaggatggatttataggagatataggtggaattgttgaaagtttacagtcggagaagggcgaaggtaaaacaactgtcatcaaattaataaattccatttcatcaattaaaatacgttcaaaattttcttcttccatatctgttagagttggtagacctgaaaaagcctcagagcgtaagatgaaacccccaattcatgttttgtttccagtaggtaacaaaggtggtcccatgagagacctcctaaaggcttcaaacgcagattctttttattctgaaaaatcaaatcgatattgttataattgtaatattccatccttaggtactaactgcaattattgcaatcaagcgactcctatcaaatttatttgcaatgtctgtaaagttgaatctcttgatttatcatttgatcctattgataatataaaaaaaaggaacaaatgtttgaaatgtggtaacgaatataaaacattttctccaattaagtttcctttaaagaccttgatagaaaaagccgaaacaaggttgagctttagggtaacttctcctttaaagggagtgaaagcattaatggggaaagacaaggaagcggaacaaattgagaagggcattcttagaaaaaaatgtggtttatctgtgtttaaggacggtaccataagatttgacgctacgaatgaacctcttacccatttcatgccatgttttatcgatacatccatttcaaaattaagggaattagggtacaaatttgattatcgacaaaatgaacttgattctgatagacaaatcgtagaattgctgattcaagatgttataattcccttagattctgcaaaatatcttttaaaaacggctaaattcatagatgaagaattagttaccctatatgatttaccaccgatttataatgcttataccgaaaatgatctgatcggacatttaatagtgggattagctccacatacttctgtcggtattattgggcgcataataggttttacagaatcacaagtttgtttgggttctccaatatggcattccgcaaaaagaagagattgtgatggtgatgccgattcaattatcctactatttgatgcattcttaaacttttcatattctttcttaccagataaaataggcgggttaatggatgctccattactaatacaacctattgtattacctcatgaggttcaacgacaagcccataatgttgacattgtggaaaaatatccactagatttttataaaaatacgtggttgggggttaaagcagctgatgtttctgatacgattgaaatactaaaaaatcgaatagggagtgataaacaattttatgattatgggtttacccatactagtagcactttaatatccaacataaatcgaagtgcttattctacattaaatacaatgggcgaaaaattagaaatgcaaatatccacagcaaatcttattaattctgtagacacaaacgaagtgatctctatggtcttgacgacacatattattcctgatataatgggtaatatgcgttcttattgttcgcagtcgtttaggtgcaataagtgcggtgataagtataggcgaattcctttgtatggtaaatgtcttacttgtaataatactttactacagacggttactcgaggttcggtagaaaaatatgttcttttagcagaaaacttgagtaacagttttaaagtcactaattatctaaagagtagagttgaatcacttattgtggagcgaaattttgtttttcaatcaaagaaagaacaacctacaatacttgattatttataaaatcattgatttttggtttattagtttgcgaaatttatttgatatggtcttaaagtggccaaattaactacaattgctataccaggtgtaggagtaattcccatagcgcgctgaaagggtgtttgggtttgccatgcgccagaattcactaccaaagttcccttatagctatccacatcaattacatgtacatgaccagaatggaaaatatccggaacgtcttcaataaccatcatatcctctaattctggagcaataggtgttctttgaccgtatataggtgatagatgtcttgatttaagtaaaatcttcatcgcctctgctggtttagaataacttaaaccaggaattgtagcaatcgtatcgtccaagctttgaccatgaaacattaatgtttttactccgtccatattgatcatgcagggatttcctagcatagtgatattgcttaaagagtaaatcttatcagcatatttccttggtattgctggttgaggcaatgctcgtcttcccaggtcgtgatttcctggaatcataaaaaccttaatgtgcttaggaatcttcgccaacaaatttgtagcatgctccatctgggaaaatgaatccttttcaaataattctctgtcttgatgtggaaatatccctattccatcaattagatccccacaaatacaaatatactttattttagaaacaatatctttattctcttcttttccatttaaccaattcaaaaacatttgaaattcatcttccatgaagaatttactacctatgtgcaaatcagatattaacacgctatatacctcagaatgagatctgtttggaattctgtctggtacatctaatgagaatattttttttattatgtggttctttctttttgaattattctcaagttctaccattaccatttgatccaaaattaatgacgaaatctgtttttttaaatcttcatcgtatgcaaatccctctaataatccactctgatcatcaatagttaaattataactattctttttgatcttcttttccataattaatcctgctatgaacaaagattcttccaaattctccttagactgtgactttggatttaaccttgattggttaagaaattgtttaatgaacgctattttttttattcttttactgtctggtctattagataaaatttttaaggatttattaaatcggcttctaaacagtgatgtatacccttcaaccccttcaccactattaatactattattggaatcataaattatgttgttaacataatagttattctccaaatcatcagaatcgcgagttaccaattctaaaatagtctcttcattattttttttaatatccatgatttccgaatgatctagtttgttaacgatagtagtaccattattagcattatcatttacaatcagtgaactatttgttgaaaactttaaaatactctttatatcgtcggataaaataaccttagacccgtctctctctcttttgatcataagaatctcttcaactatttgatacacatctgcctgtagattatcaattaacactaaagcatcgggatgaatctgaaatcctttgctggttataaaggaaattatttttaagagattggaattatcggtcaataatcaaattaactagttgatgatattctttaagtctttttatataaataataaagtattataattgataaaaaacgtattatagttggttatgcttattacatttaaaaagagactggtgtttttctttattgccatgttatttttcttgggtattttttatcttggattttcctttagaatggatgaatcattttctaaggagttatcaaaaaactttattgatcagataactgacatagacgaatttggtatattcttaaataacctaaaaatagcattagtgatgtttattccagtcataggccttataatgggaactatttctggattttctaccggtttagtgtttaattcaataatgaacctatcagatgttacgtattctaatcccttggtcattttcttgacaccatttggaatcctagagctagccgcgtatggactagcaatttctcgaagctgtattttattttttgaaatactaaagaagaaatttacaaaaaaatctttattttatctgctaatcgaagtagcattagtttctggaatgctttttgtcggggcaataatagagtggatgatgattgaaaatattccaaaaagattataattatctgtcattcgtgcatggcttgtggattattttatatcattgttataaaatgccatagtgtttaaatagttttaatgaagatttacctacagtgaattattagatgccagtagcaatacttccagatgttagtgaacagcattgtattgggtgtgctttatgtgtagaaatttgtacagctcttggtccggatgtattaagagtaaaacctgtggaaggttggaaaagaggtaaagcatttgtcttttatccagaacgatgtatctctgatggtgcttgtattggcgtttgtccaacaaaagcaattttctggatgagaccaatggaatatacaccaggacaaccaattccattaaagaaaaacgccatatttacgaaaggctgggaagagggctaactctccaccaatttttattttttctctaaattttagaattcagtaaccattacgaagctgataagattcacatttagcgtattaatattctaatatagttttctctaatatttagtacttaaatatccaatagaattactaaaatggctaattgacaaaaaaattgtatgttgtaggcgtgggtccaggatcagaaaaatatctgacggatttttcaaaagaaattatcaaacaatctcgttttattataggatataaatatactctaaatacgatagatcacctacttgatagatcatttaatcaagtatttgaaataaccatgaaaaatcaagaggagatttatttgaatgtatataataatttaatgagagaaaatgatatatgcactgttccatttacaggagatgtaaatttctcagaatcagaagttgtggaccggcttttatacctgttcggtgatgaaaatgtctgcattgtccctggcatcagttctatacaaatagcagcttcaaagtctagagttccattggataaatctaccatcataacttttcatgtcaccggtgagattgaagaaaaaaaaatagaactggttaaatcaattgttgataagaaaagtgtaatactagtgccaagaccatggccgtcggacccatcaaaaaactttatgccctctgaaatttcattatttatcaaagaaaaaggactggacacttcaaaaattgatgtttgggtatttgaaaatttgacaaatgaagaaaaggaaacaacttttactggaaaaatgagttcgctagaaaataaagactttaacgatttatcagtaatggttatagatcaaaacaaacgacaaacttacttggagttctaaatttattctttccctatttgtattatttaagttttgaatgtaaataaaatatattacaattaactttgtataatgttgaatgagcaagaacgaatttagatgttgtattgaatgtggttcaaaaatgtctaaaaatattaaattatgcccagcctgtggagaatctcagggctagatttaaatatttttgctagactcattttccattttattgctcttatttttagataatcatggcagtttattttcacgtatagtcattattaaaatacctctattttttaataattagacgatggtaaaaaaaataactctccttattcccgtgattatttcagcctttgtaatagggattttaggaattatctttgttccatcagatattaagaatgcaaacatcaatttttcaaaaggaactataaaaatagacgaaaaacttttgaccgtcgaaattgctgattcggattttgatagacaacgatggctaacatttaggaacgacaaacctgatttggattcagggttactattgatatatgataaacctgatttatattcaatgtggttgttaaatataaaatatccattagatttaatgtggtttgatcgaaatggcgatatagtttatattaaaaaaaatgctcaaccctgtgataatatactagattcatccaaatgcacatttaagaatacaaagccggcaggatttgtgttggctagttcatcgggattcatccaacacaacaacataacagaaagttcaaaattagaaatactttcagtttgaaactctatttttctctttactgcacttacttttgtcaagagcagtatcactaactcttaagttcaacaacaagaaagtaaaagacagaattgctttaaacaggtaataaatagagtaggatgtggcttatttagagaatcaagagtagccagattgtattatttttataaatgcttatttatttcttgtagttcatgagttatttcttcaatggacgcctcatcctcaagggtagtgatatctccaatagtctcgttgtttacaatagattttagaagtcttctcattattttgccacttcgtgtctttggtaacttatttacaaaataaatcttttcagcagatgcaattggccctattgtatttttgatgtggtcatttacctctatgtctaagtgcgaagataattctgctccttttcttagtaccagaaatgcgacgattgtttcacctttgatttcatcctttttactagtgacagctgcctcagcgattgaaggatgagagataaaagcactttcaagttctatagttcctaatctgtgaccggcaaccttcaatatatcatctgctcttcctagtatccaataatatccatcattatctacatatgcaaaatcacctgcaaagtaactattatgtgttttttcccagtacgttttttcatatctttcgttattgttccacaatgaaaggagcattccgggccaaggtttttttacagttaaatatccttttttattggcttctacttttttaccatggtcatctactatttctaattctatgcctggtaatgaaaatgttccagaaccaggtttcatttggataatctcaattccggtgcacatacttatcatgataccaccagtctcagtttgccaccacgtatctattataggacaattacttttaccaattgtattgaaataccacctccaaacctctggatttattggctctcctaccgtgcccaatagtcgcaaacttgataaatcatacgaattgggtatgtcatttccatatctcatatatgatctcaaggctgtgggtgtggtatatagaatggttaccccgtgtttttcaataatattccaatattgaccttggtcagggtaatctggtgcaccctcataaataatttcagttactccatgcatcaatggtccatatactatgtagctatgtccggttacccagcctatatctgctgtacagaaaaatacatccgttgggacaaaattgaagacccattttgccgagttaaacaaatgagtcaagtatcctccgcttccatggacaacacctttcggtttacctgtggtccctgatgtatataatataaacaaaggatcgttactttccatccattctgactcacaatagttggattctttgtttactaaattttcgaaccacatgtctttttcatagatatctatatcttcatgcgttcttttaacgactattactttttcaacagtaggggtttgttttacagcttcatcaactatttttttcaatggtattattttccctcttctatatcctccgtctgatgtaattattatcctggattcagcatcgttcactctgtcaatgattgattgagaactaaaccctgaaaaaataacagaatgaattactcctattctagcacaagcaagcattgatatgactaattcgggtatcataggtaggtaaattgtgattctgtctcctttttttatacccagccttttgagtgcgttggacagttgattcactctataaaacaattgattataggtaatagtaacagatgttccatcttccccttcccaaataatcgctgcctgattcttcttttcacttgttagatgtctatcaagacaattataggcggcatttagtttacctcctaagaaccatctagcaaaaggagggttccagtccaatacttgctcccattctttaaaccatgccaaattctttgcacaatttgaccaaaattgttttggatctatttgggatattctttttaattcttttatcttttttccatctagagaaatgatttcttgatgtccatcatccttgcgatatttgggatcaatcataaaaaaggaaagatttttctttacttaaatgctttcgttatttattatagtgtattatctatatacgattcctctatcaaaaaccattcacaatcataccaatttacacatattattcattcaaaaatttttctttcagtggcaatttcaaattacataataaacttatataggaatgttatatttgattgttgcaataaactaaaataaataaagagaacgaaaataaagtgtgaaatatagaagtcgaactgaaatagttgccatgatactggatgcagccaacggcggagcaaccaagacaaaaatcatgtataaagcatttttaagttatgcccagttacgtgaatatttatcagtattaattgaaaataatctaatcgaatatgttgaaggttctcaaacttacaaaaccaccgaaaaaggcttaaactttcttaaaatgcacaatgaaattggagaactcttaagttcaactactcaaaagtaaaactacttttcaaatttttataaattcttgtaatttatgttttttttaataaatttataagtgtagtcaatcaaataaataaagagtgaaggaatgatcaaaaaacaactgtggctttctaaccaaaagcctgcatatttcagatcttttttgttatttgtactcaataattatttgtagccattatatgggtggattcgttgttttctatattatttcctaatgacgcctctacatagttagttacttcattggtagaactttcaccaccttctgcatttgatcctatctcttgttgttcctggtcttgttgaatcccttgattataattcgtatcttgttccgattcttgggttagcttttgaatattgtaatctaatacctcttctttatcttcattttgaacgtttaattgatcattcttgatttcactattgtttgaggtaaccgtattgtctactgtttgttgtgtaagcttgttaattatgttatttatttctgttttttctaagttgacgtgttctattaattcattagtgtgcatagttatctgttgataaatatcttctgttatttcgttactcttatattgcaactttgcatcaaataaaactgcttttatccttttcgattccatatctatttcagatattctctgatgaagtctctcgataatctctttggtgttttcgcctaaatcatccaaccttttttcatactttaagtataccaattctgcatcgtctttcatattgtcgttatcagctacgatttcttgcaaagcttttatcctcttcaatgtcaaagatttttctcgcaagagcttttgtgcatctaagcgccatctcggaataaaaatgacataatctccttgtaccaacagttgttcatatggtaaattttttataccacttgatccacaatcaacactaacagactctatagatccttctatatctgtgatgatacctacaacttttccaatgaatgttccatacatgtctttaacttttttactgacaaattcgagcttcaattcgctcatgcaattcaatttgtagatgagtataatgctcgctgtgtgaaaaagattttataatattgtaagatttaatcaacaataaatacaattacatgcatacaataaactttgaataagacgttgaatcaagaaaattttgataatgatgaaagaaaaaaactcgaatctcatttttccaattcagacaatagtgtatttgtaataattactccacatcaggtcgatcggggagctttgatgtctagatattctaggactgataagacgatgagaaggatatttattgatgaatttctaccaaatcccaatagaggtctggaattttataacagagtccttttagaatatggcgatgaatctgtagctgaactcgggacagctcaatgtgctttggaatggatatccaatatatctgcacaaaaaatagaagatcataggatcggattatcatttttagaaaaatcatcccgctacgttgcatttgataaaaaaattaacggagtttataaatattttagggataaaaaaatcatgtcttcagtttatgccgacaagtatatacagtcatgtgatttggcatttgaaacttattcaaagaatatcttacctatgcaacagtatttaaaagaaaaaattccaatagataatcttgtttttaacgattctgaaacaaaaactgataccctctttaaaaacctaaaaagttctaaagatattgacaatgcaaaaaaaatatataattcatccatcaaggccaaagctttagacatattgagaaatctccttccatcttcaactctcactaatctggcaattacaggaaatggaagagcgtttgaatatcttttgtttaatatgaactcctccgaattaggagaaatcaaaaatttaggtgatttattatataaagaactggaaaagtacattgaaccctttatcaaacgatcaaaagatagacacagcatttcatattgcaaataccttgataataccgagaaatcaatttcaagaattctggataaggatctttatcaaaaacatgatgagatttccgttaatgacatttcattagatactttcattaatatcaaaagtttcacaggtgtcaaattgctttatcatatacccaatattgaagcagaaatcaaattggttgcctctattttgcatgaatatggtagaggtctatccatgtcttttttactagatcttgttactaccttctctgaagaaaagcgacatgagattattcgtgcatattctcattttagagaaaatagacggcatagacctggaagagcttttgaggtaattgattattcatttgaattagtaactaattatggaatgtttagggatcttcataggcatagacttttgactatgagtcgacagttgttatctacaaaatatgggtttgatgttccagaggagattagtgaattaggaatagaaaaggattatagtgattgtatgtatcatagtgctgatacttacaagttaatctcatctacgatgcctgcagaagcacaatatgctgtaacttttgcttataggtatccatattttataaaaatgaatcttcgtgaagcatgtcatatgattgaactaaggacaactccgcagggccatccagactatcgaaatgcgtgtcagaagatgtattcactgataaagcaggtcaatcctgttatttctgaaggtatcaaatttgtagatatgaatagttatgatttagaaagattcaaatcagaaaaaaataccgtattgaaaaaatctaatataaattaatcgatacattctgatctctttttatagtatctcaatattactacttttttcattaaaaccatttgtcaagagattgacttcttttaacaatacttttttcaagccttcccaagtggttgataaccctttcattggagaaatttttctcatcacaaagatattttatggttttttccttctctatctcattaaattcaatatttaagtcctctacgtcagtaacttggggattcagaaatatttccctaatttcattgtatggagtggtcaatagttctgcttttattttttctatgtcttcaatcttcttgtacttttgtatcaattttagggcattttttggaccgatgccactaaatccatcaggattaaagtcagtaccaatcaagattccaacatccacaagctgctggtgagttagattattggtctttagtacttgagagtactctattatttctggtacgatatcaacatacacatttctgttggggatttttcttttcccactaactgtcaaattccttatcaaccttttagcaccaaatagtattgaatcataatcttgactcacggatgaatatgctaaatccttcttagatagaagtgcggcggttgcttccccttctgactttgcagtaatatatggaatacccatcaatgacaataagcattttgattcttcaatcattttagaggttagaattgaagttccctgactaaatttttttgcgtcatctaatcttccctcttccaatgctacattatacttttcagttgcttcttctttgacttttcttcttctttgaatttctcctgatttcaatctatgaggtagtccgtcgaaaatatatactaatttgactccatcactaagtaaatttatgtttctataaaaaagtccactgagatgactggtgggttctccttggttgtttgctagtaattctccagtgggacctctaattgtcgctaagaattgataaattacattgaaagcatctatcgcaaccacttttccatctaaatcagaaattctgataggattagatgtaatcaatggttttaggtttaatcccatattctgatgttctaccctttatgatttttaaatatttgatatcttacagtcttgtaataacgagactactatttattattcataataagatcagttcaaataaataagcctactaaaagtaaaatttaaacattgatacataaattattcatacggtgtataggcagtagccaaataactaattctaatacctgtatcaggactggtcaactatagaataatgaatgtcacatagttaagactgtattaacaatagttcgcacaggatattaacggttctaattatacaagagatctattgtatatgtcttaaattctattaataatttgtccctgggtattattcaaatctcttagaactatctttgattcgttaatttcctgcttcaacccatcttctataatatcatttgatctaaatattgtggaaattctgaaagaggtaaaggcttgttttccttctttctttatacatttgtttattcttctttttctatttgaccatcaaatactttgccgttttcatgttgaaatcctgtgaaatcaacagatccatcaagtaaatacattcctttttcagcatgtggattcattctttagggttaatatttccatttgattttaaaaaatttattagatcgtaaataacatcacatatgaaacctgggattatattattacgtgtgcaaattaaataaatgtccagaacaaaagaaaaaaaatttatcatcgtcattcactcctagtaatttcaacatttgccattcctaaacccctctgcacattcaccagcggcaatgcctgattttttaactaaaatggcagattctcttatattttctatatctggcttcaccattttttctttccattttgtaattatccctgtgacggtgccttgactaatgccagtttcttttgctattgtgtctcttgttttacgttctagcagtcgtatcactagtgattcctttaacgactgcctttgatcaattaattctacaagaatcacactaatatgactaggtttaaaagcaaatagaatttatcgtcattttatacctttttctcatgtagcgtagaaataagaagaatattgattcacaataataaaagaatttttgtaagaaattaataaaatgtataaaatataataaacttgtatatactataataaattagaaaagaatttggaaattagttaatgaatatcctgatttattattaatatttgaatctgtctaaatggactaacctttcagagtttttagaattaacaatctctactaaaggtttaatcttggtaccttggtacctgaaaatctattattacctatgagaagaggtttgggtttaacttctcataggtaagagatactattgaataccttgaatattttcaccattaatttagaatttaagttttaatcgaacaaatttctgttcgattatgctataaagatctataaccaggtatagttctgttctatctccaagaaaaacagctcctttaaatatcaggtctatagcgagcttttcaaagcgaatgaaatccggtttagagcattcaaatctgtgcattctttcacaatatatagatcttgatttcttttgacgactatattgattttcatattggtaacaaactatttgttatgggagtaattcggagatgagactatcttaatgaagtagcaaatccgagtgggtctctaaatggattatcagaatgttttaaaacatctattcccaaaatacttgatacatcaactgcatcttggttaccttttattttactcatgatatttagtttgtatagtttaatcgtatgtaagccctagtttgaattgaaaactatttttacataagataaattgttaaaatgatattttttccgttagttttcatatatttattatcctcgattaaaacctcggtgaaactaatcctattctatattcattgtgtcaacttaactgagtagtaaaagcacaagtatctaaaacgaatcatatatccgttggttgacataaaaaaagatactatagtttagctgatattcccccatctagcgtcatcactgttccggttatccactttgaatcatctgaagctaaaaataaaatggcattagcaacatcctctggatcgccaatcctttttaatggaaatgatccctctaacatcctttttgcgttttcgtcctgtaaatatggctccatcataggactgcgaatggtagacggtgctatacaattacatcttatattgtattgtccgtattctactgctatactttttgttaacattatgatacctgcctttgtgacaccatatactgaaaacggtacccttggaatggctcttattcccaataatgatgatatattgataatattacctgatttttgttcgatcatcaagggaatcactgctttgataggctgaaacgttccttttagattaacattcatcaagttcgtccattgatcttcagtcattagatggaatggtgtaggatcattaattattgctgcacaatttatgagactatctattttatcaaaagcagtcaaagtttgttcaatgacacttaatacttcagattcatgagatacatccgccgccatatgtatcaaattatcattcttgcccaactcctctaccgttttttttaatttatttttatttctagaaactaaaaccactttactaccttcttcaagtactttttgtgctactgattttccaatcccaccagatgcacctgtaataatagttacttttccattcagtttcatgaaataattacgttgcaattaattaaaaggcttttcaattttacccgtacaattctcgatgtttatgtaaaaaggtactaaaaatgtagttattgatagaatgtaatgaatataaataattatatcgggcaatattatctatttaacgataagaattacgacaaaatagattaatattggaaaaatcttattttttatatggttaacgaattaacttgtcctaattgttcaaccatgatgcgcgccaatcaaagatatggagttgatatcgatttctgcccatcttgtaaaggtatatggctagatagaggagaaatagaaaaaatcgctaatgcttctaaaagatatgatgaggaccctgcatattcaaatgaacgtcttggaaattatgacgaatatccaagggaagtaagaaaataccgaaacgacgacgattatgatcatcatcggtatgaatctagtcaatatagttacaaaaagaaaaaacgaggatttttcaccgacttttttgattttgattaacaagtaacaaacaagtaacaaacatcatatttttcaagccattcgaaatttatcaatctatcttattcgaaattatcaagaatcaagaacttatccatcataacttagggttcccctctctatttcgatttttgctgctatttttgatatcgattttcttttctctgtttagtatgattattatgagaagaggaaatatgaaacctaaaagaatcattatttctaatgtaatgactaaaaaaaaaccattaataatcaaccaaacgtagcaaattgttgaaataaagtcatacgtactcttcagcatataatttggatatattttactttataataaactaaaagatcaaggtctaaaaaattaataaaacctctctcatctcctcgaggcacaacccaaaagatttcatgaatctccataatacataaagaatctgactagtctattcttggtttttcatctgtattatcatccttgatgattaaatattgattatatcattttgaaaaaattgcatttaatagcacgcagagattaccgtgattggatcggtatattataataatatttgggagtttgatcattcttgacatgaatatccgtagggctagatcctctgacaaacataaagtcttgaatttttgcataaatacgtttgaatggggggattatattgatagagcttgggataattggataagtgagccatctagtctgctatttgtctgtgaaactcagttatcatctttcatttcaaaatcagatctcgtaggagtaattcatattcttcaatgttcaaataattcattatggattgaagggctacggataaataagctatatagaaacaatggttttgccaccgccctcttaaatcatagtattgattatggaatcgagaataacttaaatgaatgctgtgctttggtttctcaagataattttgcttcgcaaaaaatgctagaaaaattaggatttttgaaactcttcacctgtacttattataatataaagttggaaaaattaggatttacgggtaagaaattatccacatttacaaatatatcatcaatcaaattagttattaagacaccacagttggctgacgtcgccaagattcacagatacttatctaatccaaatacaacaaagattatggatgatagatattttgattcttggagattctacaaattcaatatggattattcaaacttagttttactaataaaaagtaatgaattattgattgttttaaatgaagatgatagaatagtaggagttataatgatgaaaacaattgttagtcaagatagcttcgacaaaaaatctatcatacaaattagttactttaattgtatcaaaaggtcgttatacttaaaagtcttatacctattactagagaaatatcataatgatatgcgatttgataatattcaggtttttttaccgacttttctaggattaggaaaatttcttagtttcgaatcaattgattactcggatcggttctgtctatatacaaaaaaaattaaggatattcggaataagtaataatttacctcatgattaaaacaacatcatatattgttgcattattctgcttaatcgattctaatatactagaaatatccagcagaagtggaaattcaaaatagttgttgttcaaaatcgatattgttcattgatccaaaatatactttggatagggatattaataatatcgacttcaactcgaataaccatatatacaaagttaaattcgaaataattctgatgagaagtgaaaaatctatctggtttcctcttttacttcttcttttccactcaatattaacttataatgaattaacattcttctaggcatactggctaacacagctttcccgtaaattaataaaaattcaaaattaataaaaattcaaaaataattgtaaccagtaaaaatatcgtcatagcctctccaaagaaaaagaaagtcaatttataatccatctttgttttttcgagtaatccaagcctcaaaattatactacgagaagtaattactatacgtgttatggtggtcagtatataggagaagttggaaaaccgtccgagatcaacaaaaattatgccattcctatttttatagaatcttaatgtcttatcagaatatttgttggctagatatagggagacagcaaaagcaatcaaatagggaactataaattagattggaaccccaatgatgaaaaatgaactatagagtaaaaataatgtaagcgcgaattgtataattgaatgggtgataacttttctcttatttaatttttcaaacttttattactgatttaaatctcatgtctatgccactagttcatcttattctttgattcatcaattgtgcaaccttgtattcaagcaagatatggttaatgatatctgatttcatatcgatctaatccttgacttcatctttataccattttttggattaagtgtgattccgggatccattctaattttttgatttgggataagctctaatttccaataacttgaaacggtagcaattaatagtatgccctcttgccatgcgaaagattcccctatacaaccacgtattcctcctccaaatgggaaataactaaaccttggtaaatgtcttttaaactcatcagtccatctgtcaggattgaattcgctcggattatcataatatcgactatcatggtgcataacatattgactcattaggattgaagatccctttggaatcgtatatttatcaatcaaataatcctcttcaaccaatctaccaatgctccaaacaggtggataaatgcgcattgattctctaaatattttttcaatatacttgaatttaggtagatctttgatagttggatttctataagtctttttctttccatctatattttttaaaagtacggaatctatttcttcaaacattttttgttctacctccggatgttgggatatgagataataagtccatgtaattgcatttgatgtggtttcgtgtcctgctatgagcatggttataacattgtctctaatttggtgatcagtcatggggttaaagtccgatatggtgcttgtttgatgctcgtcaaattcattattttgttccacttttgaattaatggttgatagtaattgtgcttgtattagccttgataacaagtcatcctgcttctctacttgtttacttgatccttcaccttcatcgataacggtagtcttctttctatcttcaattaattgataaactatggaatcaagtgtttttatcgattccctactattatgtacttctggtagaatttcaaaatgatccaaaatgtgtcctattggatgttgaaggcgtttaaagtatttctttgaaacttctaatgcagacgaaaatttagatgcctcgtcggaatcaatttcataattcataatagatttacaaattattcttagagtaacattcatcatttctttatgaatatccatgatgcagccatcttcccattctttgcacatcaaggatgtcttgtctacaacgattagaccataagaagcaattctctttggtaaaaacaacgggtgaattatttttctttgactatcatgtttctcaccctcacttgttactaagccttcgcccaacaatcttttggctgtttgcagccttttaccttttctaaaatttttatgattatagatcaaaattttttcaatgtaatctggattatttattaaatatacatgaccattaccaattttaaagtgagtgatctctccataactttgtgcaaaattacttaaggttttgattggatcttttgacaattgacgtagtaatcttagagaaaattttgatgatggtcctggaggaaattctagtattgtctttgaccttttagatcaaaacagggacaacttgcttatataagttggtcagcttttctatccatatgataataaatattttatgaaaaattatcttatttgaaatgttgtcgtagttatcgtatcgtagaactctagcttacagtggttagaaaaatagattattaataattatacgtctagtattatattttagaaacaataagggttagcattgcctgagatcaattgaagcaatcgattcaagcaaaattctagaagctagaattgaagttgcgttattgatgtcaaaatccggtaagagttctactatatcaagaccgagaatacctgaaccaactgccaccttaatcagagttatcaaatcaatacttgataggccccctgctgaggggactgaaactcccggagcaaaggctgggtccaaacaatcaagatcaatggaaatatacttgttacctttgttactttttgctttcactttatccataattttcgcaattccgaattcatttatatctagaggtgtaacaatgtctaatcctgctttgaaagcattatctaattcttctggctcggccgaacgcgttcctatcaaaatactttcattaaaatctatccatcttgaagcatcatgcaatacggaaccataatagtcatctgtcgttgaaacaaagtcgggatgagcatcaaaatatactagtcctgtcttaccaatatagtcccctattgcatgcaatataacagtagtaatcgagtgatctcctcctatgacgatgggaattttttttgaggaaactagttcaaatattagtcggtacaagtcttctctcctaatattgccgtaatcaaaaatacattttccatctattattccacgcattgggcatattggaatagtttttcctcctctctcaaaaaagttagactcgttagatgatcttcgaagaatgtctggaccctttattgtaccctttctcttcgcgtgggatttagattcatcaggtacaccaattataacaatatcagcttttgagacctcatttacatttgaataattaagagtaatcatgtatcaatatttaattagttttcataataatcttgctccagcttaattcatccgacaatggatcttaatatggaagtagatgtacggcaagcgtcactatgaatttcaatttctattttttctcaacgatcttatttttacaaaaaatctttcgagaaaaacagcccatttaatctttaggaagaatacaaataaaataccaaatacgattattgatattattactgtaacaattaacgtattaatatctaacgacatttcagaaaaatttcctattattggtttgccaataattattgttccccacactactattacattcaataacattttggaagaaaatgtgatcaagatgaattttagaggattatatctgtacattccaaatggaataaaaataatattgtcgggaataggtgtaatacctgccagaaatatcgttagacctccatattttcttaggatcctataagtttctggataatcttctgaattaaagtttctttttaaattaccaatgtttgttccataatagctaatcatatatacaattgatttagcacttacggctccaagtgcaccaaatagaactattaaatttggatctaaatcagtgactaaaactgctgtcattagaatgggaaaataaggaattggaacaataattagcaccgcagaaataaatgtcaaaagaaatatcgctaagtaatccattccctcaatgaagtgtataaagtcaaatatctccatggtaataagtacaatacttatacttgattaattactgttttttttaaccaagatggggtctttgtgtaatcattgcccaaaaagacatccgaacttgttaacctcaaatctttttgatatatttgaaattatttaatcaataaataatgacttactataatcttattccaattttgtctattcattttatcaaattcaacctactggaatatttttagtggtgtctatagtcaaatattaatatgttacctccgtaaactttagattttttcaggattacctgtgtttgcctacgcggataaacctagataggcgcaattttgattgtcatatttgttaattttggaaataattaaaactctggggatcataattacattactggtctgaataagtaattggaattgtaagatcatcccctcgtaggtttagatataatcaaaaatcttgaatttagccattatagtcaatattctggtgacaatatattagattttgagatcgttactatgtttttattgtatttcaattcaaattagagccaataaatttatttaataccctataatagattgattattggataataaacagaaagcaacaaaagcaacaaaagcaacaaaagcaacaaaagcaacaaaagcaacaaaagcaacacctgtaaaaagtggaacaaaagcaacaaaagcaacaaaagcaacacctgtaaaaagtggaacaaaagcaacaaaagcaacaaaagcaacacctgtaaaaagtggaacaaacgatataccagtggtcaaaaagactgtaaccaaaaccaaatcaaagccatctacaaagaaagagaaatctctgtaagttagttttttcacaattttttcatattttatttaaatctggttctctattttatttgctctagaatttgaatgacaaaacctcaattcattgaatcgtgatacaatagaatgttcaaaataactagaattaggatcgtctacaatcgtgagttcaccgatagcaagaaccatgtccttacaagtgtagtttcagtaagaagaatcaaattgaccaaggttgttgaacaatattcgttctattgttatatattattaaataacattacctaaaatggattacattgtacagataattctgtaaagtcacaaaaattagtgtcattctttaattttatcttcggtatataatactataaaggcttacctcggaatagattatactttgtctatgcaaatgtgattacaataaacaaataatatgatgtttgtatgatgtttgaattttaaacatgacgttaagattagtcatagaataatcttgggaactgttgctttctacttgtgccatcataaaatgactattaatcaagttgtagtttacatagataaaggaggactcgagttaagtagatatgggaattaatatagtatatacttctgaggacaataaatttaagccattcaatctatactttgagccatatatttctgaaagcaacgccgctaatcattctactctgaagctagttaacaaggatttggcattagaaatttacttggaaaataatgataatgaacttatcataaatcaaaaaatacaacgcgatcttatgctgtcatatgaaaaaattgtgatcgaatatgatgatagtaaacaaatattccgaactttgaaaaaagttaaagcaaatttagagaacttagttaaccaatgattagaatatgacaaatattgctattgaaaatagaggcggacggtcaaacatgtatacaacaggtaaattaaattaatatattgataattaaaaacaagggcgattttattttcaacaatgactttgaatacaaatacttttttcaagtgtacataacatgaaatttgcacttggacttattgatatcaaatgtctcctttatttaattcccattatacttggatatttattagatattgttagtggtacttgatgcctaccgagtcaacgtttctttcttttctcaagctgcctatttttctttaatcactattaaattgtcttaaccaggattgctgaaatatgttaaagaatagagacataatattagttgacaatatagtacaatattacactgcgtaatatatataaatctagtaaataactaaatgtaatgaataaaaaaaagcaaatgataaaactgaaaattattagtcgatctccatatctaatgggtataagaaaacggataaagatacatagtgaaaaataaagatattactaaatggaagtaatataaatatcatattagtattatcccatgatatattcttctatttatcgccatattatgaactctgtcttagaacccttaaccttgaagcactaaaactatataatagtattataaatatattcaatcaataggtacaattgactgttcttcataaggtgccagaatttcattcaagattaatcttcctctttctgagactttgtagttgattatgactttgctaccccaattttcttccattctattgatcaattcttttctgaccatttcattcaagatttctttatgtttaacattattcaaaccccggtaactcataagcttactctgattaatttcaccatattcacaaagtttcaagagaatattcttcttgataaatattcgatcacggtattcatgaaccacaatgaatcaatcagaccaaattacacattgattaatattaaaatttttgataaagataagcacctagactagtcttcatttaatagtttgaaaataatttatgacctacgattttatccactttgccgatacttacactcctatctatgagggggaagaattatgggatggattgttatattataaggatcaatcatagaaatatattgtagtaagatgtctaaaaataaaaaataaaaaatataaaaaatcaagcaggttatgaagagtttactgaaacttttaacacctggatcagggtattaatgggggttctctcgcattaatgcttattagtatcgaaaaaggatatagtagaataaatgacaacaaaaattttcgtgaacctgcctgtaaaggatctaaacagggcggtagagttctttactatacttggttttaagtttaatcctcaatttacggataagaatgcaacatgtatgataatcagcgaggatattattgtcatgctactagttgaagagttttttaaaacctttactaaaaaagaaatttgcaatacttcaaaaaatatagaggccataatagcactatcggctgagagtagagaaaacgttgatgaaatgattaataaagcaatagaggctggagggactgaaccgagaaaaccacaagaccatggatggatgtatgatcgtgcttttgaagatattgatggacatctgtgggagataatatacatgaatgaaagcgggttaaaatcaaataacacagcgtgataatataataaaagatagacttgatcttgttgcttatatcaagtcacatctaacaaaaaactaaaaaaatttaaaatgaactatagtggagatgtatcggaattcaagtagttgattttctaatctaatatattttactggcagacctcattactccatatattgtgcatgattttacaaatggcttgtttaacaaggtagataagactcgaattagtcctgcatatcaaaagctatgaatcctgaatcatcttcataaaaaaattaataccgtttagattaaataaaatggaatgttttcttgcatgatgctatagatgacttctaaggtaataaatgaaattaagattaaaggtggtagggtgctgacactagttgagggggatattactgaaagaattgtcgatgtaatagtcaatcccgcaaattcttacttacaacatggtggtggaattgctagtactatagtaaggaaaggaggaagtattatacaggaggaaagtgataagataggttttgttcaagtaggatcatccacaataacttctagcggaattttgccatgtaaagctatcatacatactgtaggtccaagaatgggtgaggggaatgaggatgaaaaattgaacaaagccatcaatagctgtcttgaacttggcttgcgaaaaggatttgaaagcatctcaatccctgcaatcagttcaggtatatttggttttccaaaggatagatgtgccaaaatattagtaaatgaaacgatatcttttctggaaaacctggaagactcacccacaggtattaagttagtagaattctgcatacttgggaaagacaccttacaagcttttcaatatgaattcgaaaaatcaaaaacagaatcctaaaatcagtacaattgttcttcaattataaatttatttgactttagttaagaaaggaataagaattaatatttatgaatttttcctgttgttgattaaaaaacaacctgttatcattattatcttttctgaagaagcaaccttgtgaattgatgatatgatatttagagctattgaacttctgccaacaggacgaagtaataataaaattaacagttgcaatagtaacttattggtcagaaataatgatcttctcgatcatttaaaggctttagaccacttttatgagcggagtactctaaagcggataacgaatctacagatgcttattcttcatataccaaataatcgttctagtatattttaatattaggtaaactagacttgataggtgttgtatgtggatggaaaaatagctaataaaaaaattgcattggtaacaggtgccaatagggggataggatttgaaacttgtaaacaactttcgcaattagatataactgttctgttaacctctcgtgatcctacaaaaggtgaagctgcagctagacaactaacagacaagggactagatgtaatcttttttcaattggatgtatcaaataaaagtaatatagaggatatctttacaaagataaaaagacaatttggacgtcttgatattttgattaacaatgctgcgattctatatgataaaaatcaatctactattaatgcagatctagaattggtaagtaaagcattgacaacaaatctatacggtccatggcttttatgtcaagctttcattccactaatggaaaaaaacggctttggccgtatagttaatgtatccagtggtgcagcttctctgcattatatggatggtggaacacccgcctatggtatatcaaaagttgcacttaatgccttgactagaaaattagcctcagaattaggacgaaagaatgtattggtaaactcgattgatcctggatgggtggcaacagacatgggtggtcgtggtggacgcccaatagaagaaggttgtagagggatcgtatgggctgccaccttgccaaatagtggcccgagtggaggattcttttatgacggagaacctgaactttggtaatgattctaatgaaaagatagttccgtcgtctatcttgtttcctatctacttacaggcaccaaaccattctggatctgaaccttggctcgtaaatttagaatgattcaataatgaattatttgactaaattacccttgatgttatattttttccattcactgttatacacagcataacaacaaaataaaaattctatcagggaaaatatggatcgtattattccatcattcagacaatcgatggaaattgaaaaataattggtctgaatctaaataaaattatcatttaagaatgatggacaaacgtttgacctaatttttgaaaatgctaaactatacatcctatctatctaatatctgtaatcccatctaatttgattccattattatgggaacgctttttcataaccatgaggtactatctacattagatgacaaagaaagaagaaaggtgattgatagtaaactaaatcccgacttaacttttcaagataatagcaaaacgaaaggaaaagatatactatttgataagacctgtgaaaatgaaaggacttgatatatatgccttacatgaggatgatagagaatgattgttgaatatatactctgatatatgcagatatgatggtaattatagttttacaaacgatagcaaagattcaaaattagatagtttttctatatatttatttcatcacacttctggtcaccaaaaaaaataatcaaagaaataaaaggagagatataactaataaaaccccccaaggacaagattatttattacttatatcaacaattacatttcctgattatattaaaaattaatatgattgcattatggtaatgtaatatgtcatctccctcttttatagatcaaattccaacctggactttaaatgtatactatgttgaaacatgtaactgtaattatggatgtccatactattttaatggtttttgcagaacactagttttatttcatattcgttttggaaattatgacagtacaaattttcagggaattaacataatttttgcattttcataaccaaaaacaatttatgaaggtaacgaaaatgctcagttatttagtacaaaaaattcaggcgaacaatatacgcgaagacaacttccaaaggactatttggaagcttgctgaggctgtaaaaaaagatgagcattactgcaccatatcttaattttgatcattctggtaaaaatgcatatattcaattatagaatacaaacgtccttattttttaatagttatagtatcggtcaagttaataaaacaaaatagtgcaacctaattggataaagttcaaaagataatcttagtctcgattatttctgtttctgcaattgcatggattttttccttagtacaaccagatatgatggaagcaatgatgaccttaaatcccatagcaacctcaatttttatattaagctggactattggaatggctgccatgatgtttcctgcaattattcccatgatattgctatacaataagttgatatcaaagagtcttgacgatagtagtcataatcataaaagtgattattacacaagttctgtactaggtaactttaaacccgcggttgatactcccaaaccacaaaaaaatggacgattttcctttatgtcattacctttcggtttaccaatcaaaacagctgcattcataggaacttatcttttggtgtggacattgactggtattttccttctagtaatatggtctattgtgatgaatagtcttcttgttacctacagttcaagagatattgaaattgttgcaggattaatacttttgatttcaggtatttatcaatttagttctctaaaacgaaaatgcctcggatattgtgaatctcctttggctttttttatgaaaagatggaagggcaatagggtaagaagcgggctaacaatgggtttctatcatggattatattgtcttggatgctgctggccctacttccttcttatgattgccttaggttggatgaatattttttggatgggattgtttgcagggataatttttgcagaaaaaatatggtccaagggaatttatgtatccaaagcgactggaattgtttttatgatcataggtatactcgcaatgataggaacaatatcggttatacccgaggatgaaactatgggttcactacataaaatggagaggatggatatgagtaattcaaatcctgataaaggagttggtgtaattgacaatactgtgaacatgaacatgaacaagtcaaaataggtagtaaaataaattcatttaactcaaaattcttgaaaaatttttatattaaaggctctgacgacaaatactttaaacaaaataatgtactttaaattttaatagactaatcggtatctatgaccacaaatagtataccttcttggaaagcatcgggggattggtttgacgtatgtaaatgtaagattccttgtccctgtgaatttgcacaagaaccaacctatggcgattgcgagggtgtacttgcatatcatattaatagcggaaattatggtaagatatctttagatgggttgaatgcaataggtctaggttcgtttgaaggtaatatatgggcaggtgctacaaaaataaaccttggtttcttttttgatgaacgtgccgacaaagaacaaagagaagctctccaaatgatatttagtggaaaggctggtggatttatggccgaattagtcaaattgataggcgagattaaggggatagattttgcgcccataaaatttgaagtttcagatgatttgagctactggagtgcagaaatccctggaaaagtacttgcaaaagcagaagctcttggcggtccaatgaccccagcgggtaagcgggttcaaacaataaatccaccgggtagtgaggtgggcccaggtgcagtagctacatggggaacagctttaaaggatgaagtggatgcaatgggttttaaatggaaaagagagggcagatctagcaaacatataccgtttgcttgggaaggtccataaatagtgttacacagctaaccattgcaattattatttaccaagaatcgtcttgattaatcctatggcatattcttcagaaggttgttccgatgaatagccgggagatgatgaaatggatttgagtcttatacccaatctctccacaggtttctgcattattttcctccactggtctatttttgagactcatttataccacatatgttatctgaatagttgttattatacatctatttagtaactcagtaacttttcatatttcaaatttgtggaattaacctacgtttctacatcgatattgttactaatcagagtagaattaggctgactaaaaaatgtagtcatctttaattgaagaattttgccgaatgtgtagacaaatataaacaactattccaaatgagtattataagaactttatagaaaactattacaaatttttttaatagaactaaatttgcaaagtatattcaaaaattattatatcatatattattactaaagaaggcaagaatagaatgttaaagtcaaataacacaaaattaactgcagtattagctgtagcagtatttgctacattaatgacgcttggtcctacaacatccaattttcaaaacgcatttgcacattatggagtggatatagatcaatgtaaggatgatgaagattactacaaagataacgaagaagcatgtgacaagaacctaaaagcacactatgatgacgattatgatggcgattttggttctaaaaccatcgatgaagataatgataacggcaataacggcaataacgacaataacgacaataacgacaataacggcaatggaaacagtgcttcacaaggcataggccaatctcaatcttctagtcaaaactcccaatgtgtctctggtgatgatacaaatgactcttgtaacaacgtaagtgtccaaaaccaggataatgatggaaacaacgcagctgctcaagatggcggaaacggtaaaaaaggcaagggcggtaatgatgctgaccaaggcataggccaatctcaatcttctagtcaaaactcccaatgtgtctctggtgatgatacaaatgactcttgtaacaacgtaagtgtccaaaaccaggataatgatggaaacaacgcagctgctcaagatggcggaaacggtaaaaaaggcaagggcggtaatgatgctgaccaaggcataggccaatctcaatcgtcaaaacagaattcccaatgtgtctctggtggtagtctgggtaattcatgtaacaacgtaagtgtccaaaaccaggataatgatggaaacaacgcagctgctcaagatggcggaaacggtaaaaaaggcaagggcggtaatgatactgaccaaggcataggccaagatcaagatagcgaacagaattcccaatgtgtttcaggtgaagatgcaactgtttcttgtaacaacgttagtttccaaaatcaagtaaatagtgggaataatgcgttagcacaagactaacatcctttttttattattctgactatattgatttgaaaataaatttaatatatcaaattctgtcttctaactaagtaaactttatcatttactgtaatcatcgcatttaaaatcttacctgttttaatttttttttgataactaataagcaaatttttgatttgaatttcttatttattcattgttcagaatattaacttttatttttcaaaataaaggtcaatttacctacgaaaaaccatgttactagattatctatttaacatatattctataatttgaaacatgacacatgtagcaaaaataacagaaatagtaggctcatcggacaagggttgggaggatgctgttcaggtagcattaactgaagcgacaaaaacaattcgcggcataactggaatcgagttaaccgatatgacagctagggtggatccaaatacgggaaaaataactgaatatcattctacggtaaagatagcctttggggtggaacattcctaagaatcaccagataagggacttgaatttccttttttccataaattagctttatttttttgtcatgatacgccttgggtaggaaaattgtgatcgcgactttctatatatacaaaaatttagtatgatttgctgttttggtttatatgatattctgctattaaaatagaaagaattctttagtaagatatcttgacatttcttttagcccaaatgattattttgtgtttgtgaataaaaaacgtaatattattacaaaattgattgtaactttttttataatgacaacgggattcttgtcatctatttctgcaccgatatcatatgcacaaagcggtggtggtattcctgatattcctttttttaatttaaataatgataataaatttaacaataatgaaaattcttatggcgatattaacaacaaagagaataacaatttaaaagaattatacgacatgattccaggtctagataaaaaagacaacaatgatgtaggcaattcagattataaaactggtaacaaagatgctcatgaaaagactttgaatgaaaagtccgtagattcaaaaaataatgatgaaagcaaaattaatgattatgaagtctattctgatgatgcaatagatgggataggcaactcgggttctggaaacgaaaaagatgaaggaacaacagcaacaactcccagaattcttacctctatcctagataaattgccttactctgatgttttatctaattctttgttaccgtcctcctcctcctcctctccaccaccttcttcctcaacatctaaaatgggagaggtaataccgggtcaatacattgtagtactaaatgatgacgccttgaatttgcgtgacattctttcagaggttgcaaaaaaggtaaatattgaggggactgaaatactccatatttatgacgatgtattaaatggatttgcaattagcgttccaaatgaaagagttatcgaggtgcttgaacaaagcccatttgtagattatatcgaaaaagacaagacagttaaagcatttgctcaaacactgccaagtggagtcaatagggttgatggagacctaagctctaccaagtcagggaatggtggtggagccatcaatacagacatagccatcctggatagtggaatacatactagccattctgatctaaacatctatcaccagaaatcctttgtcttaggtacgtcgtcaggaaatgatgataacggtcatgggacccatgttgcaggaattgcagcagccaaagacaattccataggagtagttggagtagcacctggagcaaaactgtgggcaatcaaggtgttggataaaaacggttcgggagccttatcgaccataataaaaggtattgactatattaggcaatacgcaagtcaaatagaggttgctaatcttagtcttggctgcgaatgtaaatcttctgcgtttgatactgcgataaacaatgctgtaaaggctggaatcacgtttgtagtagcttcgggaaattcgggaaaagatgcttctacattctcccctgccaataatcccaatgttatagctgtttcagccattggagatagtgatggcaaatgtggaggaacgggtcctagcacgggttttggaagggatgacacactggcaagtttcagcaattatggtgcagttgtagatatggcagcacctggaaccaagatatattctacttacaaagggaactcatatgcgacaatgagtggatcaagcatggcctcaccacatgttgccggagcagctgcattatatgaggcctctcatcctggtgcttcaccttcagaagtacgcaacgcgttattaagcagtggatcaacatcatcaacaacatgtgatggaaaaggccatggttactttacaagtgatagagataattatagggaaccattgttgtatgtaaaaaattattgatgatgttgttaataccaatatttaaccaacaagtatgtaaacaagcatagatgcagaaatgaaatatgtattttatactatttctgtgattcctgttttaagcctcgggagtaggactcgaatccataccatataatcacagattcataaattagaattacctctggatccgaactgacttaattttcaaagattagaaagaatatattttgtaaattttagcgcatttacaaccgaaataatgtagaataacattagttaatggtaagtagatccaatcaaacctgttttttcttcttagcctatcgaaaaactagtcgtaatttccaattttatgattatagatttcacataatctgtttgacaagagcattttaatgaatgtggtactcgattgcagggaaagttagacgaatacacgaagtgcaggtacacttgggatcattggtacagaacaaccctcagtattacttctatcgagtaagaacgtagtcaagtcgtggcgaagccaccaaactatgaaaaaaggatttagacgataatgctaacctattgtgaatacaaacggttgtgtaatgtttgcgatctgtccattctcagtctggtaatgaaaagtggcgctcgctgttgtttgtccagctgctatcgcttgataaattgtgccagaagatggtcccgctacagtaacttcttctccagattgtaattcgaaaggaggtgaagttgcagtacagccctgcatatatcttattacaacattgttgagaaattgtgcagatataggtgaatcgcatactcctgcagtaaatgttatcttatttggtgaatcattaacaactgttgcaataatttgaaatttgctgccagactttaaatgtaaaggcgagggaagtatatctttcagctcaacgccagtacttgtagtagtatttgaggtcgagtttgtttcattagattgagagtttgcatattggttccctaaccccggtaaacttaggagggtaaaagcgatgattgtggctaatacaggtagaataatacattgttttgttttataaaattgcattaggaatctcatagattgtgtctaccattctatttatatttatccgtcgttgtgaacatgtcgctgcacaatttctaattaccctatttgagataaaaaatatggtcgatttcccgtcatcaatggagggtggtaagttctatgccaattccgactaaactaaagcagttgcaatagatacatttcagttagtagaaagatcaaacacatacttggaaagtacattacattatcttcaaacaaatggtaggatagaaagattctacaagatattccaatcaaagataatttaatttgaatcctttgatatattcataacaaggtacaacaccaagagacctcgtatgtctttgaactggatgaattagaaaaacctctgatttcatgaaactataatcctatagcaatagaagtaagcttaaaataccgtggttggagattgtgacttatgactagttcaaatgaaaatgccagccctcagaaggttaaggaacagagtgatgagttgaggacaaagtacccaatttttactgccattttagaaagaattccagacatggatttgaaagaagtccttagcgtaatcgtagtagttgatcctgtaaggactttattgaagactcgcgctaggagattggcattcataggggaggataagaaccttgaccagatagttgaagaaagtcttaatgaggtgaggacaaaacacccagtactggctggtattctagaaagaatccataacatggatctaaaagatactgcaataggattattaggaattgatgcaatggagtcactgttaaagcttagaatgctagtgattctaacttcctaatcctctttactaagtttagaaaagatgaatttttaaaagatctcttattttcaatattcatttaactgttatttttagtagaacttcaataattctctctgtaactcatattttcttttccttttccttttcttattttagcaagattttattcccttaccttctctaacattaagatggttgctatcaagtgatcgcttttatgtttctcttattttcttaactttccgtctgttttatgatcgacttctggtggtgtttacaaagaacaatattttctaatacgatgataagtagctattttctgaaatgtgtatcttaaacatgctgtaaatcgatttaaccgagtttgtgtaggaccggagctactcgggaacctattaattccgtagctcgcataagcttttcgtgaggtaatgatgccggattcatcatgaaagtaactcgggatataccaccgagcgcttgactgtgtctaataattttctctgtaacttcttccggattgcctatgaggagcgctccgttggggccccgctgggcttcaaaatccctacgagttattggaggccatccacgttcctttcctatttcgttcatgctatgtgcatagcccggaaaaaagtcatctactgcctcttgagtgctctctgccacataacccagcgaatgtatacctactttaagctgatgtggtaaatgacctgccctttttcctgcctctctatatagatctattaatggtttgaaactgggtgtttggccgccgatgattgcgaccatcagaggtaatccaagtaaaccagctctaacaaaagattccggagttccaccaacacctatccatataggcagaggattctgcaagggtcttggatagattccctgtccagtcagagcaggtcgatatttgccagaccaatggacatgttcattttcacgaatctttaacagcaattcgagcttctctgaaaaaagagtatcgtagtcatccaacttcaggccaaacaatgggaatgcctcgatgaatgagccgcggcccactaccatctccgccctaccttgagacaaaagatccaaagttgcgaattcttggaatatccttacgggatcggctgcactcaataccgttactgcactggtaaggcgtatatgtttagttcgtgctgaggccgctcctaggatgacagctggagcagaatcaaggaatccataacggtgatgttcgcctactccaaatacgtccaacccaatttgatctgcatattcaatttgttcaaccaatctttgcaagcgttcggatgaacttattgatttcttggtatcaacatgaaaagctgcaaaactgtcaattcctacttgcatctgatatacatcaaatatgaatattatttaaacaaagtagtagttcttagcttagtaaatatgaattgccatactagttttatcataatcttctaatactttcaataaataataggaataatcatgacgtcaacttataatcaatataaatggtatatggtttacgtattgaatgcatcctaaagcgttactgctatcttcaaatatttaataataataaaatgttatctatgaaaattctaaatacaagtcttggcttcggaaagccaatgacagagagacagttagaggattatttggataaaagcatccttcagatgcacatcgaaacattagatgataagaaggatccaaatatccatcttatgagcaaaaataacaaggctcatgaggttaagttcattgtgatagtagggttgccgttgtcgccaagattccagtgatggatccttatattatggatcgcatggtaaggtgaacgaaaaggtggcacctgttccattctcattattccttgcccaaatccttccactatgggcttctatgatactctttgtgatgtataatcccagtccaattcctttttctgacatggttgtaaatttggtaaacaacttaggtagtatctccctgtcaatgcctttcccgctgtcctttatggatataaccacacatttttggtcgtttatgaattctatatctagtataatatttatagtgtcaccatcatttgtaaacttaaatgcattatccaataaattgcaaataacttgtgcgatccttgacttgtccagtctaaccaaaagagaatcgtgaattatgttattgtttaattgtgaataaaccatgcgagttttgtatctgtcacaatttgttatattatgcgggttcataggttccattttactagtatattgattttcgtattccatcacctgttctagcaaaaacagtcttagatcaacggtctctttcctaagagtcaaggagtttgtttctattctggtaatatctagaatactatttgttaatgataccaatttttttgcatttcttataatagcatcaatatagtcatttatctcttctctgttcacctgaatctgttgagagtttcctaattcctttgagtttacatttgatttgagcatttcagaaattgccagtattggttgtatagggctccttaattcatgagcagcaatccgaataaagtcttgctgcaactcttcacttttttttagctgctgatatatttcggtttgattccacaagttctcaaatattgaaacataagataaaacgcccgctttgctgtttgaatatgtcgatatccctatggcttcatgaaacttttctttggaatcatcctttagttccattacaagtgataccttcttgtcgactataagaatggtggatcctgtttcaattaaagtttgggtgggccttatctgaactttcttgctgttattgttgtcattattacttgtgttgtatatcaacaaactttgttttttcaatctttcaacaaatttctctgtcttctcgttgttagggatcagcattcgtatctttacatttctgtttactgctgcttgggttatcaattcaaacacccctagtttccactgccttagaaacgcgtttacagttggaagtattagcattatctctttatttgatgatctcagcagatcaagatatgcggtttccgcgttgtttgaccttgagatgatatccactctttcagtatcaagtcccctttctgtgtcctctattatgtctatagcatctatgccattttcccacagttcctcaaatgttagtttgtactggttgatgtataggacgtcatttgttgtaaacatctgcttaatggtttttctatcttgattgtgatcaattttttcagaatttgagaaaaagactcggtcagttactaggaagtttggtggaggcagggttctgatacttcttattttaatgccaatgtccatgaataacttggctacgttggcgtcctctctacgactcaagtctgtgatccaccttacacccttgtgataacccttgtcatacttttccattatttcctggtatactgaaaaaaaacaatcatgtactatttttagcaagccggtatctgagcaaattagtatttcttcaccatctttactcaaagaccttatcttatcgtttatttcatcctgatcatcaagaacccttgtttctattctctcatgtccatcctcgatctccctaatcctttgtattgcgggtatggcattggcccaaagactcttaaaaacatactgctgctgctctactatttccattacgttactatggataaggtgggacacaggtttggcttcttgtaatttagctgtagcaatatattcgctttcgcttactgccataccccctttcgcattgtccacatgacgtacctcagctattttcatcagttctttacaataattgatattgtgttttgtaatctcagaaatgtatttgattttgactcccctttcatatgcatgtctcatgcctttcctcaatttttccacgcccattgctactgtaggcccttgggaatcagcgtaattatcccacctatctttcgcattattcagtgtatgtacaattaattccgtagttttatcctcgccatagacaaccactgttttctccccaattgagttattgttatttttatctttatcacttctaatggctttgagatttttgtcgtaacaagcgctatgttgattattagaattatgatttttatcttccttgattaatcggtaagacgactttttattctcttcatcaccatgcctttttcctgttttttccttctcggtattgtctttgatagtcaatactcaacaatatcaatatcatttcgtagaatttaagcatatcgcttttttgttaacttcaccctttggtcaaaacacgaagttattggatgggaggaggagatgagattggaatctgtgtctttaaggcgtgggttctatcgacatcctagtattaagagttagatcattatttgagaagagggtgagatgagatgagatgagaggaggtttatctacgtgacaggtaatcatgcattaatccaaagtagtaatttatttctgaacaaacatccgacaatgttaaaagactattgtgtgtattggaaaaatcttaactggcatataaatattaaaacaaaattatgaaaataatctgcttaacattcactagtttctaccctaacagttactactatttttaaatcattattttggcttatttttattcttgtacgattaaattacatcatagttaatttggttcttttgatgtattagaataatttagatttattgtaataacttttcttatttctagtaatattaaaatttattaaatcaagaagtattaagcgtctgtggcgctttcacataaatctcttgaattgccgtctactgacatgcacccttcaataaagccttgatagtactgatctctacagttatcgtacgttctttgattaaatggatgatcttcgccatcgattattccacgttcataacaacttacgctatcatcactacttgcatttactgtagtaagagtccccggtgtagtcataaatagaagaggtaacagcatgatcgacattccttgtaccaaagtattgaattttttatcatttccaatgtgtaatgattccatcaattaaattatgaccgtaactatttatatatttagtaaataatggacttgattgataatgatggccaatatatagcaatttatataacatcaaaagtaccagctacctttgggatttaagttattaaactattattgcatcataagattaaaggcagttaggacaaaagatgacatcatttatttagaaccaaaatcgaacccttgtttaagtgtcaaacttttgctcgatcttaattaagagtgagattaatccataccgcataattgtggcttttctgtgaacataatggctgttttattaattttatgtctacaagattgtaacatggggaaaaatttgaatatcccgaatttagatttatcctgaattaaataattccttgtttcggggtgtgaatagtactactagttagtatgaggccaactagttagttgaggctaaagaattttttagcttcaacatagacgttacctaatacttctgaagtttcattaagaattgctcctgatgactttgacgtagctattttttccgtaacgttacgtaggaatgatccagtctcagttattgctccttttattgattcagttgcttcttcttctgcagatgttgttattgctggagtagtagtagtattagtgttagtagtgggcggagtgctggtttggttcattgttgaatttgtctgaccatacactgaatccaacgtaccttttgctactatcaataccatcccaaaaacaaataagattccaaaaactacacgcatttctttcttgcatttcattttattcatatgttagtgatattatatttatccttatatcctatatcatttcgttagttcttgcaaccatggagtcttgttcgaaaacaaggaatccagttctttatgaatttgataaaaatgaggagaatgtaatatgaagtcgtgaatgcaaaattcggattcatatttaaattacaagtctatggaaaattaacttatagaaatgaccagcacaaaatgctataatcacaaatcatagatatttataacaatagggggatatttcataatcattttcaaaatgcaggtacctagataaaataaattctactatctatcaatagggtctatgactgaagtaaaaaaattcccgatggatatcattccgtcacacccgctttgattgtaaacgatgggttaaaggctatcgagtattataaaaaggtatttggagctaaccagcgagcatgtatgatgatgcctgatggaaagaaagttgctcatgctgaactcgaaataggagattcattgattatgctaggagacgagtttttagagatgaagttcctttcgcctaccatgattgggggaagccccgtttctttggttttgtatgttgaggacgtagataaaacgtttaatcttgcagtatctgaaggagcaaaggtgttagatccagtaacagatcaattttggggagatagacttggaagcattgaggatccttttggacatcggtggtcaataatgacgcacataaaagatcttaccacagaagaactgaaaaaggctgcagaggaggcttttgcaaagatgtcgaagtaaccttaaggtaaattaaaacgaactaaaaaattatttttctaattattctcgaatatttgcgcaaggtttttcaatcagacagttatttgcaatatagggaaatatttgattacttatcgtaatttaatttgtttaacattaattccatcaattctattgttgataccctctcttactgataattatatactgggacaaaatcaaggaaacgtaagtggtgttcagaccacacagatgtatcattattttaattacgatgacaatgtatcaatgaattatccatcaacctggtcagtgaatgaaacagacataacgcctgaagaccgagtcaaccttatcgcagggtttgtatcgccgtttgaaacctacaatgatacttacattgaatacgtatcgataaatagggacgatggaattttctctgaagtcgacctaaatgagtatttagcagaagcgatcaacacttacaaagatatcgccaataactttacattaattgaatcttcaacttctgactctctttcaagtcaacctgcttattctctgacttttaccgaagttctcagtggcgaagatggtcaagaaccgattacacttaaaaactttgaaactggaattttgttaaacaatactgcatattttgttacttacgttggacaagaggaaaaatttgatagatactttcctgttgtagagcaaatgatcaactcattcaagttgctcttacccgcgtcctatgatgaaggcctagcgccacctttagttacaaatctcaatacatctacaattggattagaagaatctataacaggcacaaacgaaaccaccacttcagcttctacagggtctaattcgaccagttctaacccgattgtaccaaataatttaactaatagtcaaattggacaaaaaaacaatacaaccgagtctgcttcaaagggtggagaggcgaacttatcaacaggaggtcagcttcatgaaagttcccaaattaacgatactagaggtagtgaaaatgcccagttgaaaaaagataaagcagtagatattcaaataaaagcggctgagaagaacggcttctttggaacggtaaactttgtaccaaatgaaattgttgttgatatcggcactatcgtcgtatggaccaacaatcattcatccgtacatactgttacttctattaacaataatactttcataaataacggcatcacaacgggtagagatggaattccactttttgattctgactatatgaataccggtgataagttttcttacaactttactcaacctggacgttttgattactttgataaaaatgatgctagtttgaaaggaatagtgtttgtcaagcaggcaccaagtctgattaatagtacttcatccttgctagataatgaaaatactagcccagctaatgtcaatcccatttcaaatgattttaatagttcaaataataataaaagtggaatgcttgacaatcttaaagatgttaataattctagtgcaaagtccaataatggaactctctctcaactggtacaatctctccgtcagatcattaaccgttaactaatatagcgaagatgggatttaaactcctttcttgcattcacggaccagaactacttgacaatatcgcattagagtatgaataaatagaaataaggataggtggtagctatttaccatattcatcatattcatcatattcatcatgacgacgaacccaatattgcagaaattcgtgacctctctcatctcgacccttgggaaccaagtcaagataattatatgctacattcaacatatctataccacgcgcataagttgaataggtgtgaaaaatatgacctgcaggatccttaaaaaaatacactgactccttccttctctgaaacacctgtgtcttgtgcaacataattataaaacactctttctttgctaattcttcctgcgtgaaagatacgtggtagtcgaaattaaaatcactatcagaagaagagacccaattaaaatcccaacccatccgtttttggtaggcagttatcttgttgtatggagcacgtgatacagcaatcatagtaacatctctttgattcaggtgtataattattttattgaagttgtcggcccaaaaggaacagcttggggagtgggcgaatagatatgccatttgtaattttgtgtcgaccgttctgtgatcaaagaggaactcaaacatagttgggtggaggagggggaaatggaatgaatctatgtctctcgaactgaggttcaatgtccgtatattaagcaaaccaactatagaaccgagaaatcggcacaaaataaataaaaaaatgacacgatgtttgttaagcaatcctttaagaaatcaaatttacggaatctatatgagcccgtacaaagaaggattgagtaggatcgcgatcagctccgccggttattgtcaggccatacggatctttccagttttgcagaatgggaggaattggagctgactttaatgagtcattagaaagtgcatttcctgtttcatcatctaattgccaagagatatgctcaattgggattgtatcagatagtggaagattattgtaacttcttaacaaatagtgatctgtgtcccggttcacaagttcaactaagaaattgacattcttgggatcggttttaaaaacgaacccccctacattgactgttattccaaatgcctttctgtcatgtggataatctcccacagtctgatctgtatttgtatcctttgttggaagtctataagtatattcaccagttattggagttccgaccttcgcattgccatataatagattcgatctatcgtccatctgtgttactgttcctataaaagatatctttatttgattggattttggttcatcagaagcatcgtccaatgtaggcacattatttgtaccctgtccttcttctgtaccttgtccattatcagctgcaggcacattatttgtaccctgtccttcttctgtaccttgtccattatcagctgcaggcacattatttgtaccctgtccttcttctgtaccttgtccattatcagctgcaggcacattatttgtaccctgtccttcttctgtaccttgtccattatcagctgcaggcacattatttgtaccctgtccttcttctgtaccttgtccattatcagctgcaggcacattacttaatccggttaaattttgcaatcctggaattttacttaaatcgacgcctcctatcgtttgtgaatatgctaaattcgaatagggacctaatatccaactagctgttaatactaatgcaattaacaaaataaagtgttctttacaatttttaattgtcatacacttcttatcaactcatgtggatatataaaataatttcgtcaactgatcttatgttatagaaaaagcctttatagtaatggaagtagaatcaaaatatgataatggttaataaaaaatctttgatttttcagtttcttgtttttactgctttattggttactctttcaacaacttcaatcaatttagacccagataataaacttcaaaaagttttcgctcaagatgagagggaaacttctttgataaaggacaaatcaatattggaaaagcctaatgatgacatggtgatagtcaaagagccaaacggagaggaacagagtccctttgtgaaggacaaatcaatattggaaaagcctaatgatgacatggtgatagttgaggaaccgcttcctgatgaagactttgtagaaagtggagatgcatacttgactatttctaccatctttaaaggaattagtgatgataattatcgatatgtacaaaacgttggtgtttgtgtagggtctgaattgatagtaagcaataaagaagtatctgctgttcctgcttgtgcaaaacattctgaaaatggtgtaaaatataccgttcaggcaccagggaaaatatatgtatatttgtcctacttgcttgagaattatgccatggatttaggctcttcatcatgtgaaaataggatatttccaggagagtctcagtcgtgtactctaaccgtcacactcaaaccatcaccttttaaataacctctctccttcttcctcacttttttagagcatggaattacttctacaaatggttcagcggaccaatgacagaataaatggaatgagtgtttcttgatatggacaatcatcataagatttgtgggccaacatatggtatatgattttatgaaaaaattacagcaatatcatagctgcacttgtcattaataaataataaatttaagagatttagaaaatcgaatgcgaggtcatatcgtttttcaggttatagttagatattgcactttattattcacagttggtgtaccattatccttcgcaaccaatgccatcgccatcagcatcaaggttatttggatcattacctccaaccgggatgttcttctcatcaaagtccttacaatctaaatccttaccatcattatccaattgattattattgataccactagactctaccttgtccttattatctttattactattatttgatgaacagccatgctcttgtgcccaatttgaatcagcaaattcagatacatcacagaaatcttgataaacatcagcaaaaccactatccagtatcgcttcattaacgttaacaccgtcacaatatacaactgcaactgttcgaccataggtaagtccttgattattatctggatctacctctgaattcttatccaaacatttttctgtcatgaaattttttgcctcatcaaatcctgattcatctgtttctggtgcatctattaatgctagccttactgttattgtttctccctctgttgtcgttacatcaagagtatctccatctatgacttttgttactgttccactaaagtttgacgaagaagtggtaactaaatccgaatttggggaagtcgcccagacttgatttgaaaaggtaatagttcccaaaaaaactagaaaaataaatattgtctcataaaataagaaatgatgcaatactgattattattatattcgatatataaatatacaaaaaataagtagggttattctacaatatctacttgtctagtttagtttcatcttacatcaatagtgatcactaattattttcttcctcctcatcattactatctgattcatcatcattttcttcatttgcagtttcatagatagattctccgccatcatcacttccattgttggacgtatctggctcttgttgtacatcatttcccgaattttcctgttcttcactttgttgttcttctaaaatttcatccatcacttcaattatcaggttcttatctgggtcatcatcttgccagtcaattgaatcatacttaggatcatttcatggatctgttgtttgttctggttgttgttcatcatcattatttgtttggttatcattcccttcattagtttcacaaccaatgccatcgccatcagcatcaaggttatttggatcattacctccaaccggaaagtttctatcgtccatgtcctcacagcttaaatcattgccattactatgtcctcgaccgttgctaccacttgacccagagttttcatctttgtcgttatcgttatcgttagacccttgataattatttaccacaggaagaggagaaggagtaacaaacaatccaccagtaataaattgttcagttgtagttccaccgttgtcaaatataaacttgggattaaatggaggacatagaattttgagttgaatctacgttaagtgaatagaatgcagcttgggattctgaaataataaaattaatgaaatataaaacggatgattttccttttttagtgatgcatttagaaaaaatttctgcgttcgctcctttgcctataagaataatggctggaattgcctttataatccatggtttaccaaaatttgaaaatttacaaggcacacaaggcttctttgcatccgttggtattcctgcagatttagctctactaatagggctactagaagtaataggaggagtattattaatagttggactacttacaagaataaccgccattctttttactatagaaatgatttgtgctgtccttatagtgaaagcagacaatggttttatgggacaaggtggcttcgaagttgatttgttattgatgtttatttcaattagtctgttattatcgggacctggcagattatctatagaaagagatatactaaaacgagagattttcccaaaaatttcgtacaaaaagaatgacagttctgacaaaaagtgaagtagttactttggataatgccatgagttcctaaagagcaagtgatatatatgagaaatagcttaatatgggaacttctgtttccatcaaaaaggttaggtattctcctatctttttttcttggaagaataagaacttgaaaatactataagagataagaataaagaagacgaagttgggagacctgaatctctctttcagacatggtggcttacaaaaaaagcattagtgttaacaaaaaattaattttaattgaaatggaaatccttaacgcttactttagaaagaattcatatatcattaacatttagaattctaattcccactttgtgagtacagaaagtctactatgggactagattttcatttagttttgatttcatcaatgacctcctctagatatttcttaatttcagcctcctgtattgagggggaaacaccggtttgacgttgcatttctatctcacgttcatgagcctttttcattactatgtttcttgccttttgtatctcttcttccatctgcgcggttcctatatcatgaacaagctctaacattgattttctaacagatctccttagatcgttatcatgagagagagatattgcggaggcatacaatccaatgctaaataaataggaggataataacaccaaggaatgaccggccacaccataggtcggttgcaacgcagagatctcgtttgctatgccaattgcagttattcccatagctgcaattgtcaaataatctttgactttctgggattttaaatttttagtaactaaataaaatgccagtccaaataggagactacttgctatagtgcctgcacgaaatatcagcctaaaataatatttgtatggaaaatctgccggcagggaaaatattaatccgctacctatgagatataagactaagggaacagccaagattatccagaatttgaaatcaagcttgtgagttttcttgtagtagtaaccgagtaataatgcggttccaatccaagtcagaatatatggacttaatgaagtaagataaataatttgattgtacagggccaaacttgaatttggtaccaagtaaagcgtagtgtaatcagggtttactgttttatacattattgcaccatcgtattcatcaaaaaccttgtaaataaaagaggccgtcggaattacaccttctgcggattcttccttaactatttgaacaaggaccaacttgtcaaaagcatctcctgatatagacagcgcaagtgctgttgctgctagaccataaaataataccacaaagtttcttttatgtaatttataccatgtaaaaaatttaaagctaattattcccattattgcggcagttgtcaatgatgctattgcattaaaagcgataacaagatgttcagtcccactacataccgtaaagtattctggacagtttgtgatgttagtatacagtataaagagcaaaattccaaataatgaaaactgaataatgctaaccattatatgcattattcgcatcaaaagtgacctctctaagagatccttggtaatatacctagtaaagcccaaaaggattaaagatccaatgccgtatccaaagactgttgtaagtgtaaaaagaacaatctcgcccgcattattcaagtaaatgatttggcgggtagttagtagatttaatataattagaacgactataacagctgccgtaattatggataatttcctattgttaaaaagaaaactgtatagttgcaatttttccaatcagatacaattcctaaagcagtataaaagtgtatttaagtattcaattcaatttcgaattagtcttattttgaaacatatatcaaatgcttgaaataattggaatattaacatgccattgtattgttttggtgtctcttagtcttgatataatattatgatatgtgatatagagacaaaatacaaatctttgctaaagataacaagttgacaaaagatctggtgaataatgagttgctgttgaaatgagtattagttcccttcatataggtggaattatttctctaattgatatctctttaaactcgtcctcaatctgatccttgaatttgccttgattctaaacaaagaaaggtagtttatcttttacgtttcatatttgcaggtccaaagtctcgagaaaaaatgttgatattattactcctactctatctatggaacaaatcaaagtcaaaaaaagtaatagacataattaatagcctaatggaaattaaagaagtgggggaagaaaatgggtatttcacattatttctcaattgcattaggtgtcagaaattatacaagatccaaatccaccaaaatgcaaaggtagaattcgacgtaaatagtatgatatatctgatctgaaaaatccatttgagccaagtgtggaattagagttcattcataaagtatacaccaaaaagttcagtcaattctaaaagcatgagtctatatatcttcttgagttctacagactataaaattttctgaacctagttgtaagattttacaattatttaaatattaatgttctcaaataagtaaatgatgagtgatgagcgataaaaaggatattgaagccttttcccaagactacaacaaattaaatagacaacataatcttaatgggatagtttaaaattcttgtatctggcaatcaaactgagaataaatactccatagttgaatttacttttcctccaagtgaagattcggaaataccattacacaaacacggaaacgaagcattggtaatgcacgtgattgaaggcaatttttcctttagatacggaaaagaaaccttaaaaggaaataaatctatggtattaagttttgaaaaagataaaagtcattcttatagaaaaattggaaatgatcagggcaaattacttgtaacatatgctcccggaggattggaaaacttttttagagaattgagactttccaagatggatgataatagatagtctatacagtttgattcaattatagttcatttgttagaaagtaattataactggagatttatttttgattaagtttctctatttacaaaacgaaaaaaagatagggctgggactcgaatctctgtttttcacacttgggatccaacttcgatacttcaacccaatatttaattatacaaaaaatacaatgatctttatccattgacaaatctctggttctataaatttaaataatacctttcactattgtattagtatgcgtttggtaaacaaacccaaaaaccatttaattgaactcgctttaaaagcaatcgagttagtgaagattcattaccaacattctactaggatattttgtatggtattcgaatatatacgtaataattgcattggaagcttttgaaatgagtgaatattcaagtatcgattcgttttcagtagaaagcaacagaatgcttgctaaaaagccatttagtgataatcaaaaaataaccgctgataggatcgaaacacatacccgttcagtattagatcaagtgaataccgataatttaagacaaaatctgaccagcttatctaaatttcatactagacattcaaaatcacctctcttgaatgacgctagtgattggataatgaaccaatttagaggatcaggttacaaggattctttttatcattcctttaaatcaaccattgatgataaagagtttagtcttagaaacataatatgcaataaggagggttttgataaaaaattgattatcatttgcgctcattatgattgcattatggagaataaaggagattcaaatagtcgtgctccgggagcaaatgataacgctagtggcgtaagcgccatcatcgaaatagcaagggttttagcaaatgagaaccttcaacattctctccaatttgttcttttctctggagaagaacaggggctattgggatccaaaagctacgcgaaatacatcgaaaataacaagatggatttgtatagactaattaaccttgacatgattgggtatccattttttgcagataatactgtaatcattgaaagagatgataatatggatctgaatcacaacaaggttagagaaaacgatcttaaatctatagtgtttggagaagttatgaaagatttagcctcagaggttaatcttaacttccatttggattccatatatgacagtgactatgaacctttcgaagcaagtggacatgtagtaataggtgcttacgatggatttgcagatccgaaaaaaaatccacgctatcattcatcctcggacctgccagaatttataaattggaactatttaactgcagttactaagttggtattgacaacagttctaaagatcgattctatcaacagtcactaatacaaataacaacaacagttccatatttcaatgataaatagaccagatgacgttgggactagaatatccgtctttcagacatgtagtcttacaataaaatagatcatttaacttctgaatttaagaaaatgatatggtggtcaagacaatttccattcaggacaacatcaattttccataaagcctcaaagatctgtccataggatttacttctcttgaaaggttgggggccgctctgaacggtaatagagacccgatcactggtgaacccttgatatcttataacagtactatttaggagtaaacgcaagtataccatcatactgtactctattttttaaatggatgaatattttgcacacatgatggacgaattgtattttcccttctcataatgtcggtaaaccagtcgagtgagttttatcatgatctttgtttactcgctcatatgaataacctcatttaatcatctgcactaagtgcaaaaatctacaagctccttctcttgcattattcatccactgttcatccactgttcttgacatgttcgtagtaaatagtctattcgttctgacttatcatcagttttaaacttggtaactccatgatgttgcttccaagtctctttggtttcaggatcggacaatattgtcatacagatcctctgcaaatatcttttatatgtaaactgatcgaaaaataaataatcatcatgaatcacttacaaattatgtatcaaaaagtatctaaagaaataatatcgattattgttataacgacgctcttgacagtgttatcgtcggtgatgcagctttcatacgcacagtcaaatacggatctcgaaaatgacatgctgaatatccataacgaggagcgcgatgccgttagcgttccgccgctaacgtggagcagtagtcttgaagccgacgcccaaagttgggcgaatcatttgacgacgctcgggcttgtatgtgatcccgcacgagccgagctagtaccacccaagcccgtatgcgatactactccacacggtgctaaaaacgagaacattgcgtctggggtcgcggatttcaattcaccaggggaacttgcccaattgtgggctgacgaaaaggcgaaatataactccggacaacgttccgggccaggtatcggccattacactgcaatggtctggaagaacacccaagagattggttgtggattcgccagtagtggtcaaatggactttctagtatgtcgctataacccgccgggcaacgttccgggacaaacaccttactagaatataggatcgtttgtttgacaggactcagctattcattttacaaagtagatcgattaatacataaatctcattccgcagtatcgtatgttcaatctcttgcgtaattaaaactggctagctccttctcctacccaatatcatccaactagcctaacgaatccattatcctatagtttaccagtcctgatactatgtccgatgtcttatcgtactttcttaatctattcctaaacacatcattcattatcccgtacttttttattctgcagatggtatgttcgactactattatccttcttttagagatctttgttgtattccttttccttttctgttagatccttttgatccttttctttctttcttattgataaagaggttttgttttggatagtctttttgtacttcaagcccaggaatcctaggtcaaatgtattaataacatctttgggataacagggtgattcttcttgtatattttgtaatcatgtctcctacctacctacctacttattttttgatttgtagattaagaccgagttcgtttactgtgtagattctttgttgtatttttgttcttcttgccagagtagtatatctttcttctcatcctgtcctttggtcttgatatttcttgctctgtacagtctaaaagcaataaagcctggaaagtactgcttaacaacttcctcctctggtctgttcaatcttttggtcatctgatggtttttgaggaatgggtacaatgtcttatcatgccatcaatcttttgaatgtctttacatacgttactctggtttaaatcaaacaggtatccggtcaaggtataggtataggtgatgtataataatagtaaaccaaaatcataacaaacctgttttttatgtctagcttaaactgccttcctcctgcttctactgatctttctctctttctctctctatcttttctatgagacagaagacgttttatcatgtttggtattttgattctatcgtttgatagatgtcatcaaactgtttgattaaaagaccagtgaacgatttgaaaagtacgtaatggttttgtagataacctttcataccatacgatagcaaaagaaggaaggacataggcttatctaaaagatagaaggacataaagctgtttgactaactacgtaagatctgattaactcaatcttgtaagataattaggaattttaataaaaaccagtaagaattatgacatcgtgttaaatatcggtcaaatgattataaaacatcaacctaattttttgatattataaaaaccctgcaaagaacatgcagattcccttttatattttatcttttatataacttggttaatatattatctagtatagtcacaatctggttattggattgaattgaattttattatcggtattaatttgtatttcttgagaaaagctaacctgtgtcacttgagacacaatctcttaattaattttccttaatacatctatactacattccatttataagttaattaaacggtcaacaacatattcaatctcatttgcaagacaaatatcgtttgatttttcttttattatctttaaaataatttagagattgctatatattcacacatcgtttcataaagccgcttggactaattacgaaagaggtctattgattaattgtttacagaccattttcgcatccattgaagcaaattaattatagattccacaagttcttgacctttcggagttaaccggtattccactctgggaggaatctcattaaaggattgtctgtttaagataccacttttttccaattcctttaatcggattgtgagagttttactgctgaaacctttcattgacttcctaaatgtcaagtatctgactgggtcagtagaacagcaaagaggaatcaatatttctaacgtccctctcttagtaattatctttcttaattcagatgtttctttcattagattttccacatcataaccatagaaattacaagaattattttccttgaggataggcaatttacttgattccaatgtggctttattcagtatatctccctttagtttccttaacttcacttactttaccattttactcttaccaatttaaatagtttcctttgtaaacctatacctatggataaacaattacaattaaaggagaagattaaagaacaatatggaaagattgcactagacggaaattctaattcttgttgtatgccctctagcgactgctgcggtacatctgaaattatactttccccctttgaatcatcaaagactgtggggtatgattcagataaactaaagttgattcctgaaacttctgtattaggagtaggatgtggaaatcccactagatttgcagatattaatgaaggtgataacgtagtcgacttaggttcaggagcagggattgacgtatttcttgcagccaatttggtaaaagaaagcggaaaagtcattggaattgatatgacaaaaaatatgctcaacaaagcaagagaaaatgctgaaaaacatggatataccaacgtcgagttcagacagggagatattgaacaaagaatacctgttgaagataattttgttgacgtagttattagcaactgcgttattaatctaacaacaaataaggaaaatacgttcaaagaaatttaccgaatccttaaatcagaaggaaaagggaaaatggttatatcagaatctagttacttccaaggaaatagatctagattctgttaatacggataattggtgcagttgtattgatggtgcattaacaaaagaaaactacattgatagtattaaaaaagctggatttaccaacattgagatactagaagagaaattatatacggagttagatgaaggcaaagaacaagaaaatcaagaaaaaagacaaattactagtatctccatcaaggctgttaaaaagtaagacggttagcaagagaagtgatatagatgaaatttccatttgacaaaaaatcctccgataatacaaaaaaaaactatcctctttgtatgcgttcaaaacgcggggagaagtcatatggcagaaagtttctttagaaagtatgcaccaaaaggctacgaaacggttagtgcaggtaccgttccaacttctcaaattaatccgattgcagtagatgttatgaaagaggttggaatagacatcagcagtcaaaagcctaaagatttgacagaagatatgatgcgaaatgcaacaaccataatcaatatgggttgtatggacgataaatactgtcctgcattatttataccaaaagttatagactggggtattgaagatccaaaagacaagccgatagagaaagtgagacaaataagagatgaaattgaaaaaagagtattggaaataattgactctgccagagacaataaaattccaatttaagataatagcactttatttcgttcagttaagtgaatccaagtaactcctagtaaataatcatgtcaaaggaatctacttttgaatctgtagttagcaagctatctactaatcaaaaaaggtttatcgcagaactggtgggaacgtttgtcgttgttgttttagctacaggttcggtagttattaatgcaaagttaaatggtattcttggactaccatttgttgcatttgctccttttgtgggcgttgtaataggtgtatatctttttggaaaaatctctatggctcattttaaccctgctgtatctgttggatttttaatcacaaagcacatcacaaaaaagctactagttttgtatcttttggcggagattgttggtgcttttctagcaagtctttttgtaagtattatgataggcaaagaggcaaacataggagctaatgcacctaattattcataccctttacctttaatatttggaattgaagttttagcatcagctcttttaatggcggtaatactcactgttgtttatacaaaaggtttgaaaggattcggcggtatcgctattggaggtattgttggactagatattttatttttggcttttatatctggtgcatctatgaatcctgctcgttcactagcccctgctgtgttatcaggtgtattgacagatctatggttatactggacagcaacatttgtgggtactgcaatgattgcattaatctgtagaaaaaaaggtttgaatgaataacaaatattgatctactattggtaacatccggtaaccgatgccattcgattcgacctgtagctttgaatagtcaatatttgatgtacatacaataatatgaataataaatattagagtttgttaagaccgttctgcaatattttatagtaactttttttcttaaggaacaggaacttaagttgaacaataaaaaaccagacgaagttggggctcgaatctacgtctttcggacgtgggttccaacgataattatcgcttaggtgttaggatatatgaggagtagactttgattttatcactcctcatgattatttctttataattactaaatttaggtcgcatttagaatatactaaaatacaataatcaaaacaaatgattggataagttaagttttaagaaatcaaacaccccgagtatatgtaattgaatctaaaaaaatgttatgaccacttcttaatctgttagttttatctttgactacagcaaacttaaataatactacttaaattaatacgaaatgtcaatctcttgttccatcatcgtagtggatgacgaaccagaacttgcatctctgttcaaagcatttttgaaaaatcaagggtatgatgtagtccctttcaccgacccgatattggctttggagtattataagaaaacttcggataaacattcattgataataacagacttgagaatgccaggtatatgtgggatcgaccttgccctgaaggtaagggaatttgacaataaaataaaaattttcttgatgactgcttttgaaagtaaagatttggaagatagaaaagactttaaaaatgcaagaattgaccgattaattcaaaaacctgttcgtttttctgacctacgagaaatgataaacgatgcttggaaaaagtgagcatgctgattcatatttttactgcaattaagtgatgatttagtaacttttgcttttgctcctctgacaatctattaaaatctttttgatgatatacgcatatcctcttcaactcaatatcgtatttagaaggaagagataactcaaaatttacaaggtcgtctatgcgatgtttaaaaggaaaagtacctttatcggctatgattgatacgcctgatttccccttcgacttagcatactcaaccaaggttttgttataattataatcagagtctggtgatacgttacctatgtatttctttaatgaatcgacgattattaatgatttttcggccttttcccatttttctatatctatggatgtgagtccttcagaaagtatttttcgcacagaatcttcggtttcataaaaaggtgccagttgaataacttcatttctttcctcaatccctttttttacatattgagaataaaattctcttagtataactaagtcctcataaacaactatgtgtgaatcccataatctgattctgatatggtattggatgcattggctgcattcatctgaatgatattattttcaacatatatgtaataacacccgcctatattattttgtccaaaaaactttataaacttaaccaaggttgcaagaagttattttaaaaagtttgaatgaataacaaatattgaactcgtgtgataataggtatttaacaacggtagtaattctataattctgtttgacgacacagaataaaatgggttaggattgtaaatttaaccatatttgtactgttgttgctgaataggagaaagtcaaaattagaatgatactaaagttttttctatgaccatctaaatctaactctttaaatcgtgtattctagagaggccgggcaaatgaaagttgaaaaccatctggctcgcgtatgtctatataatctgaattatcaaataatatatgcagatgtgcagaaaattaataataatagtttcttcttttttttctatattacttgcgttttctgaatataattctaatgctttttctttaaatgatactaatccgtcaatcgttaaaaacgatagttggataagcgaacggaataatttgaatgtaaccgtacaacttatgccaatagtcccagttatcgacgaaactacaaaaatattatttgaagtgacctctcttaataactccaaaccttttgaggacctgaatactagagttactataacagaccatgatggacgattatataaatttgaaaataaactcttgcctgtaattgatggacaattttctgtcgattatatttttccagatgacggagaacatagaataattttgcaattatataaaaatactactccttttacggttagttcttttgatttactcattcctcattctatgcctccatcacaaacagacaatatactaaaaccgtttatcgactttttcaattctttttcgtaaatactatttcgatgaggatacagaattaatcaagtattcattagttaactttcaaggaacaaattttatttatcgagattgggattgggctaacatttagccgggcaaaaatttggttgcgcccgttgtacagtctccatcactctctcatcaaagagcacacattaaagtaaatagaaaggtgttggtccagtcataatgataataaatttaatgtagatcctctgatagttctattctactctcgaccaggaaaccgcgtctggatctcttgaagcagccagccgtttccgtctggatcctcaaacgaggcaaaggagaaataggaacgagatgggatttgtttgcgtgttaggtagtcatgggttaaacttattgtgtgattaattttgattgacgaatttattagacatatatcaatcaagtaaatcaatctattagatgacgagttttgttaaagattagaaaaatgctacgaaactatgtgttataaatactataagaagtaagtactttaaatgaatatatacaaaaaattgatgttactattaactattgtcttcatatttactatacctctcgaatttaataccgttatcaatcaacaatcttttgctcaaatttcctcttctcccgaacgattgccgcctacttccccaccgccatttgaagaactacctcaacaacaaaaagccacatcgacaaacaaaacttgtacgctaacaccatccttaatcgaagttgaaggtacacctcaacagattgaaggtccatatttcgttgacaatatgccaaaccgttctgatctacgttctgaaccatctgatggttcaatacaggatggtattcctttgaacataacattcaacgtatatagagttgatgacaccgatggagatggaaagggaacttgtgttccttttagtggtgctaaaatggacctttgggaagcaaattctcaaggcctttattctggagtagaggaagatggaacacaaggattggtatatcttcgtggatatcagattactgatgaaaatggaactgcaaagtttgaaacaatctatccaggatggtatgaaaatagagcaatacacattcacttaaaaataagggattttgaaggtcccgagaaaacctttgaatggacttcccagttgtatcttcccgattcaattaataaagaagtacatttacaaccaccatataacaaccatggacctgttcctatgacaaatgagcaagatttcatttttacaggaccttctactgatggtttaataaaaaataacactggaaatcacctaatgcttaatgtattaaagtccgatggcggatatagtggcatgttcaatgtgggattgaatacaaccatggataaataacaaacacagacgaagttggggctcgaatctacgtctttcggacgtgggttccaaattcgatacttcaaattttacaatttgaaataatgattcaagaattaggtcttcttaatggacatgatgatggtcactccatccaaattcagatatattgatactaaatcaaaattattcttagaatacaggaatgccagggtaggaataacgatgacttcaacttataatcgaagattttagaaaatacatgataaactacagttaaaaaatattattcagtttgtgtgagattgtattgctggagcccaagactactacaatttaattacaaatccttagtttagttattgtgaacaaataacaatgtgtaacaatatatagcagttccgtgtgatatatagtaggatttgcagataattggaaatattaagttctaatcgtatagattatgataaagatgcctataattatgatagatcaagacctgataatcttacaaatgctaatcttacaaatgctaatcttacaaatgctaatcttacaaatgctaatcttacaaatgctaatcttacaaatgctaatcttacagatgataatgatcaaataaaattcattaactatactcagcaatattgtataggcattattgatattgttaattcaactaatgaaacctcaaaaatatctagtccacctaaattgagaaaatattattcgttatttcttaatacaatgtcatctgtaatcaataattgcaatggaaaggttattaaaaatattggggatagtctgtttttctattttcccaaaacttgtgacgaaaccaacgagccggcctttcatgaagtatttgaatgtggaatgagaatgctttcatccagtagtatactagatagtcagttatgcgagaatgaattgcagcctatcaattatagaatctgtatggattatggagaggtggaaatagcaatgtctgataattctaatgaagttgacttgtttggatcagttattaacgaatgttcaaaaatgaataattttgtgtcttcaaaagaattgtggattggggaaaaactatactatagagctagtaaatctcaattcattaacaactatgctatacataaggtaaatctacaaaataatggctttaataacatcaaatccgttaaaaattttggttgtttgtattctgtaagtatgctagatgaaattcaaaggaataaaactatacttgactacagagaaatacaaaatacactaaagaaaaataatttatcaaaacctattgctaacaccattatcaatattctaataatagacgatgaagaagatattctttacacctttactacccttttaaatagacaaggttataacgtcaaggctttttcaaattcaatcgaagcttttacacattttacagagaaaagcccttacttttataatttgattctgatggacattcgaatgcctggaataaatggtattcagctctatcataaactaagagcaataaatccctatgcgaaaattttattgatatcagcattggatgttgtacacgaattaatcgagtcggttcctggaataaacatgaaagagatcattagaaagcccatagaaccagaagatttcatattaaaaataaaatcaacaataaatgattgatcaatagaaataagttctgtttataacgattcataaagtttattccataacaataattcagtattctttagagtattagtcaaatttacgctcttacctatgatacctctcataatactaactatcatatcttttgatcctttcttgtgggtggcatcagaaatacatcatttttatattgaattatttgcagttattttagtttcaacattagctttctattatattctgcgtgcaagagttttaaaggacaattttagcctctttgttggtatcggatttctaattagcggattaattgatatgttacacgtaatagtatcaataacactaattgaaaatattgatttcttgaagtattttattcctcaaacgtggtttgcaggaagattttttctcagcgctatgctcttaattgcagtagtgaaatattcatacacatctaaagaagaagaccttgtcaatcttgataaacagtatgatactaatcaaaagatcaacccctctaaaaaccgtaaaaaaaatataatagacaactccattctatacataataattttaggtgtattggcatctagtattgctttgagctcactatttttggtctttcctgcctctgttttagatgattacccgttcataggccctatgagattccacctctgatattgtttgtccttgctttgttctttttctataaaaaacgactttacctaaaaaaagacgttctttataaaggtattcttatttatttcataattgaaatattcgctcaaatcataatgtcttttattgccgtttcttttgatactgcgcataacctagctcatgtgattaaagatgcgggatattttgtcaacatcatagcacttgctttatctagtatacactataccaagaatttaaaaaaaagcaatgctcttatacgaaatcaatatataaaagtcaaagaagcagaaaagatgaaagatcaattcttgaacatttctgctcacgaattgagaacactaattcaaccaattatcgggctttcaggaatgcttaatggagattttcaaaataaaaaacatgttgatatgaaagaaatagaacgtggtgtgtcaatcatatatagaaatgcaagaaggttacaaaaactgaccgacgatattctagatgtaactaaaattgaaagtaatgaattgaaacttgacataggagaatttgatcttcttgacgtcatatcaaatacaataaatgattgtacaatagatatggaaaaaaagaaagaaaatgtattatttgtatgtataaatgactttaacaataaagaaaatgacgatggtaaattaaaaatgtcaccaagggtcacgtagttgtaaaaggagacaaaaatagaataactcaagtattgtcaaatcttgtaaataatgcaataaagtttacaacaaaaggatcgatagctgtaacaatggagaaaaaaataatagcgaagtcataattgccgtaatagatacaggattaggaattgatctggaaataatgccatatttatttaaaaaatttatttcaaattcatttattggaactggtttgggtttgtatatatcaaaaagcataatagaagctcatgacggaaagatttgggctgaaaacaacagggacggtaatggtgctacatttagttttagtttacctttaaaaaaataattttatacaaacaatggaaacggaactaaaaaaatacattttaaagttgaccaacgaaaagttaccatttcaatatgagaataaacaaactttctttttgaaattagtatttttatacctgtaagtatttcataatatagacaaatattggcacaatcagtcaatcaatataaaaaaatatcttcttttatcatgtcttggtatctttttctatcgtcaaaaaagtttgagagccgtaccaatatcctaattttccatcctttgtgctatttttgatattaaattcggcttgttcagttagaatatgtttacatattgtgtatgcattttcttggttgttttcacgtaatttctttaggatgttacgaaaataaggtctagataatcctaaagttatttgatcgaccacatcagacaatttactaataacttgatgatattcgtcaaattatataaaaatatggtatgattccctgtttgaggcgccgggagtgggactcggatctacgtctttctgacgtgggttccaacaaaaaaagcctcctactctttcaactggttgactaatcaaggtccgggcccgtggggatacggttcaaggttgaatataatcctgtgcaaaaaaacaatgtctatctaaatcatgaattaactatagatcttttgtaaggtttagttatgtaaccgaggcagaatctccatataaaaaattaatagacgtctataacgttcatattaatgaagatcaactatctatcttttaattcgaagtttgtaatcttatcagcatattttttatacaactgatcaataactctaattctttgagtatgtttgcatttcttggggtttccagccgaatacaaatatcctttacatgtgcaaaaccaatgattattatcctttaatttattaaccttatatctctctcctgaagtaatcgatttcacataataaatatcctccttatcatcatattctaccgatttagtgaaatcaattcgctttgcatgattagaattcatttttttaaaaattccttataatatattcgcatactaaacatattaatttatgacatatgtcatttccttggttattcacttgtgatttatttcatcaacatgtaaggaagtaaagggatggccctcgatcaaaaactgacgatacgccatgattatctgaaataaacatggtccattagagtatgatgataatggacgatttaaaagcattaatgatttctttagcaatagatgacgattactccactactaggacccaacggtaaaattcctattttaattcgagatgatgatattaatttttttacaaaaagcaatatgctggaatcaatatattctaacgcatggaataatcaattcaaagtaagtctatctgtgataccttatcaaaagacaattaatgatgcttgtgtcccacctgatttcaggaactctccagaatatcattccatcgagaacaatgaagaattatgcacatttttaaaggaaaagatcagacacagtaagattgagattattcaacatggtgtaactcatgatttaattgatggtcgaggagagtttagtcagcagattgacggaaagagtgaagatataaacagaactataaaagatacatttactcattattacaggtcactaaatactgatggttatgaaaagaacaacaagataggctttgaaccctatgtaaatattggaagggatataataagaaaatcctttgatattaatccagttttgtttgttcccccatttgatgacttttctacgtacaatctaaatctcctatcaagtcttggcatgattcctatctatggacaatcaaactatcatagattttttagatcatcatacgttcccagttattttaaaaaatattttgcaagtaaacttttaaaaaaatttgccaatgtgggatttattattccctttatcatgtctaatgtcgattactataataacaaacatagtccgggaataatgctatatatccctagaaggctaaaaataaatcctatatcaaattccaataaaaatgcagaaaaagaacaagaatcttcacaaacatttgtaaaatggatatccaataccatctcttattccatggttcaaagaacgcctctaggtattctaaaccactatcatcattatttttatgattggaatcatgattctattactagaaaaaacttgtttgaacagtggaatcagattttacatctgttcaataaaattcccttttcatggaagacaactttcttcgatctatatcaacgaataagaaagataaaaaaaattaatattgcaattacaggtcaaaagatgactataaaatcaggcaatgagttgattgaagaaatctcttttaaagtagacaaggtactacagttagtaaaagaagatgtggtttatgacgagcaggacaagacaataattaccattgatcaattagagcctaattccacaagagttttttatgtcaaataatggacataatgagtgtacattatgctgcgacaagtgctctccctaattggaaaattaataactcaaaaactacaaaatacatcagatcagacgtatcatatatggtcaataataatacagagtagaactctagccaatttctgaatttctttgcttgaatacatctgtggggatacggttcaagatagaatataatcgggtactatatccattgaaaaataaatcatcgtgcttgaattcttataggactttatggtctgtttaataatctgtcagtttcgcccatacaaattatttgaatgtagcagtagcatgcatcgttctaataatttaagtggtgttaatcaaggatttggaaattatttaaatattaataaatttaccctaataagtaatgattaatgatgagcgatgaaaaggatgatgaagtcttttcccaagactacaaatcgattgaacaatatattctaaatggaataatttataaaattcttgtatctggaaatcagactcaaaataaatattcaataattgaaattacctttcctccaggtgaagagtcagaaatacctttacacaaacacggaaacgaagcattggtaatgcacgtgattgaaggcaatttttcctttagatacggaaaagaaactctagaaggaaataaggatacggtgttaagatttgaaaaagataaaagtcattcttatagaaaaattggaaatgatcagggcaaattacttgtaacatacactcctgcaggattggaaaacttttttagagaactaggaacatccacgatggaggattttaaaaagtctatacagtttgatccagttatagttcatttgttagaaagtaattataactggagatttatttttgattaagtttctcttcacataatgctaaatacatccgtggggatgtgattcaaggttgaatataatcaacgttaaaagtgatggccggtacattatatgtaaacaaaatcaaagtcaaccattacaaagatctaatgatttaagagaaagcaacatacatcaaatttcaatagagagcgcctcttgtctaatccggcaccattaaatcattgacgggtatctggaaactcaataatatcgtcaattgcaaatatttggttatttagcacaattgtgctcatttctttactgtgtcaagtattataggacgattggacgattcggcggttatttattgaaaattatggaggataaatatcaaaggaatctatttcacaatgatcaatcctagacaaaaaggttttttgataaataaactaaattaaattcatgacaccaactactgtcaaccatttttcctcaaaatccagagagtattcttatgctagaccaaaatatccagaggatctttttaaatttctaaatgagattactcctgttaaggatctggcttgggattgtgcgacaggaaacggacaggccgccataagcctttgcaaatactttaaaaaggtgatagcaagcgatgcaagcaagaatcaaattgataacgcatttgatcgggacaacatcaactatgaggtgtttcctgcagagaaacccaatatccaaaacgactctgttaacctaatcactgtagcgatggcagttcactggtttgactttgagatgttttatcgagaagccagacgagtaagccgaagtagtggaataatagcagtatgggcctatggaatgcaaaaaattagccctgaaattgacaaaataagtgaaagactcaatgttggcggagatattctcggaaactattggccaaaagaagtcaaatttgtaaaagaagaatacaaaacaataccgttcccttttaaggaaattggggttcccaaatttgagataaaagtagactggaatcttaataatctttttgattacatgcaaacgtggtcagcagtaaaaagattctatgcggaaaataaatacgacccattgagtgccgtcaaagaagatttgaagaatttgtggggaaaggatgatgaaataagactagtaaaatgggatctaaacctcagggtaggtagtatcgatagttgatattctattgtcaggctgagttattttttaactttaaacctcacgcttgtggtgaatcatctaattgagacatattaggatttgatcgtattgttacaccatcaaatagtttcctcagaaccataaaatacactggactttgtaatcaatccatcttgaaattcaaatttctcaataactgatgttctatgtttaccatccaatgttgcatagtattcaagtagaatcttgttttcttgtatcaatacttctttgggtgtaaaattcagtgaaggaaagttatttttcaaggcttttgaccgatattcctctaattctttttggttagatatttttgatgcggtgcgatctggaaatacaactttgactttagggctagagaattcaatattttccgaatacatagataatactgtttttatatcgtggttattccagccatcaatccaatttttcacatgctggtttacaaatgattcagaaagagccatatatcctattgttattcttgatttaaatataattttccggagcaaataaagatttgattttgaaaaaataatagtaaagtagaaagaaatttaacagttcatttgtccgacacaaatgtaccgcgaacccaatcgagtcattgtatatttatcattttagagatcactaagtttgggtgcgtgggggttggtaacaaatttgactataattatggattgcattgctgaggatacaataactaatagacctgacgatgggattccttgggtatcccttaaactcggttatcatcaagtttaattctcgttttcttcactttctggttcatcgtcactatcattaccttcattgttatctgattcctcagaatttgattcttcttcgataccatcattatcgttctcgttctcgctttcatttacatcattttggccgtcagtagtaggattttcaccgttaccgtcactttcgctcgattcactatttccttcctctactggtggatcggtccagtcatcaatttcatcattgtctccactactacttgtacaagtgtgatcacgacttgcttcttcagccgtacatggattactgtcatcgctgttgttttcattgttgttattttcatcattatctgtttgggtatcactctcatcatttgtctcacaacctatcccatcgccatcagcatcaaggttattcgggtcattgcttccaactgcaatatttgttccctcgacatcactgcagttcagatcgccgccgcccttactatcttgagtttcacaacctatcccatcgccatcagcatcaaggttattcgggtcattgcttccaactgcaatatttgttccctcgacatcactgcagttcagttcgccactcctagtaccattattgtagtcaatatcgtcagcttcacaacctatcccatcgccatcagcatcaaggttattcgggtcattgcttccaaccgtaacattagtttcctgaatatctgcacagtctaagtcaccaccgttgctaccgccattattgttaagatcctcagcttcgcaacctatgccatcattgtcaccgtcaaagtcgtttggatcattgtttccgactaggaagtttctttcatcaatgtcttcacagtctaagtcaccaccgttgctaccgccattattgttaagatcctcagcttcgcaacctatgccatcattgtcaccgtcaaagtcgtttggatctgtcaggcatagtcaagattcatggaaaacatccggtttctacggacggtggaacctggtacccaatggattgtagattcctaaaactaaaacaccatatccattcctcaatagagaaaagtttgattgaaaggactatgcaatatattaaggacagaactgaatgtttcgatgattattttccttgtaggtcaaagaattgcaagttaaagcacgtgaaaaattggttgaatttatttgtaatttatcataacagaaagacaaaacctgctaaatgaacagagcctgtcaatatgtgtatattgtatttaactcatgaagaacataattccactattaatccatcgctccatccgtatttcttatccatcaattgtgaaattctattaatcaaatctgtctctacagcatcttcaattacccgtccataaccgtggaatgctcgattatctacatgaaaagatatggtaggatcgtgaaggatattctgtaccctgtgtactttctttttatactctgataaaacataatatttcttattttgctcaacaaaccaaatttctattttatgtaattttcctgttttccatcctttagtcgttagataaaggaattgtgattgtgtatgaggaggattaggcaactaatctagagtatttattagactttaagatagatatgttaatctataaagcatacaatctcatttttttatgaaatgataaagtcatcaagtctaattgatgtttatttctggtggtgctggcggcatcattaagaaaaaacctttggaaggtaactgaggatcatttaacttgtactggcaatttacaatattttgttcatagcatatcaaagtagtatcattcactgaaggaactttataatattttataacttggatatttgaaagaattattgcaccttgattttctaaagttccatttattttgtaaaatcccgaagaattcttaaaactctttacgatttctaccagagtattatctaatggttcctgggtggtagacattctatctgcatagtagtgtatttcgggtttttcatgatcgttataaacagaggaattaaccttggataataaatctgatatcgataaactgtatatagccaagagaccaaatagtaccaaagcaacagccaatacagttgatccaagtctcatatattagaaaatagtataccaaactatttcatcagttgcaagttttttagcagaaaaatgaacttcttttttactatctatcttatatctatacgatatctacagggtacatgattcttagatatataagtccgatccaatgtaaaaagtgggttaactacattcgatctgttatacctaagtagagtatatttttttcgtaagggacaagaacttgataagttgaataatacaaaaccagatgaagttgggggactcgaaaccctgctataaaaacagggaatctaattattgaaggctagattagaaatgagaaagaatgggatttgtcatgtcaggtagtcgtgggttcatatcataattataactatcataaaccttaattttgataggttgttcattgtcttttgaccttaataagatacaaagaacttgcaactattcccacttaaaataaattggtaattagatcgaatggaccaacacgttctatccctatttgaggaattcctatagttcttgatacgatatatattccaataaggaaacctgaaccaatcattataccgatggagagtaatcgtaatggtatttgataatttgtaagaaacgcagtagccactctacctgctccaccgaaggttgaaatgattataaacccaatagatgaacaactaacacaagtgctaattactattcctaaaaatgaacctgaaatcaatgatttacctattttcaggtttaaattttttatcaaataaatattcatagacactactattcccaagagaagggctttggctcttcatttagcatccaaatattctgtaaggtgaccatcaggagcacgaaagaaaacagaaaacaaattaaatccaaaataatgtacttggctcttcagattcttgtccaaggaaggaaagagggttattccaatcgaccttaaacataaggttgcattcagcaaatcatccagatattatggtcccctcgagttaggttactaatggatttgtgtctatttgtgtttccttttgcttttcagacttttcatataatcaataaaaaatgttgcaaagactccagctgccccactgccgagaatcactattgcagtcccgtatgtattccaaaaggccataaatccctcattaacagttagtggcggtagtacctctattgttaaattacctttacctattatatcgccggtagttggatactttttggacacttgaaactctgggtccacaattccagttactgtttcattaaacataggcgctgtagacgatgttgtttgtactaacattgaagcctcaaaaggtacagtatacacacctactggtgattgtggagaaacctctacgtcaaataatgggggctggattctttgggcagatacacttaagccgttagagctgaaattagtgccatgttcaaaagttatactagtaacattactagagaggggtgtctctatctcagtcggtactattttctttttctccttgtcttatgactatactctcgggatgtgttaatatgtctatgacaggtggaggaacagcaacccagcttgtgaaatccctgacttcgcttgacttgaaggattctgcggtataaaaagataagccgtaattgcttggggaatttatagaatccaggttcaatagcagtttgacatatcctggccctattttgggattatcgaaaggttcagtatagtttatcttggattctataagcgcagaagtacctgttgatgataactggtaaagatattcactccattttccattagctgcttcaacataatagttgaaattggctccgctatatcctgaattttgaggcaaggaaacaatggcaataagcacaccatacctaatctttttgaaaggttgatcgtatacagaagcattttccgaatttgatttcacccaaaatgtagtatctagagtttttccatcactaaaataatccactgccagtaggtctgcagggtcggaccttaaattagcactatcattaccataggtttgaacccagtcgtttttctgatcgctgatatttttatcataaattaagacttgatcaaacgcaggcggtgcagcaaaagcctcatgaaagagcgaacaggggtttaatatcaataacaacacaaaaattatactagctgaagcaaaagctatgaatgagcatttttgtgattgcaagtccgtattgagtaaccctttatacaccaaataaaatcatacatagataaggtttttgtcaacaattcgcatattttaagcacattaaataagcgaggtttcgggtctgaacccgctatgctccttcttgtaacctcactagcctgactaacttgtttcaatttatggatgatcataaaatgaacagcaaccaatgctgccccaattgttatatttggtttaaggtgtagcctttaagcggatttgcgtattaattaggaaaacttcgtaaccaagagagggattcgaaaccctgctataaaaacagggaatctatttctgttaaacaacccaacaaatggagggaatggaatttgaactcgtctcttgatttcacgggtttccattgatttccatatgctaatttagctacttccatatacatttgaaacagtgaatcttgatttttccgcctagaattgttcatctcttatgacaaccctctttgttaagctctttctttagattcatctttttttagcataatagatagtatcacggaaataatacacaacagcgtcatacaaagaaatatttgcataaatgaattagatgagggaaaattagtcatattggtggcaacatctacttttaaaggtgtttgatttatttgcattaacattcctgcaagagctggtcctatagcagaacctataaatctaaataatgtgtttactccaaaagatatccctatgaatttgatgggtgtagaagcagtgtttatatttatttgacctacatttaataaagataatcccgaacctattattgcgagacttatcgcggtccatacaaggttattataaagtaatagaatactaccaaatccaatcgttgctattattgatcctgctataattaccctaaatgatccaatttttgatattatgaaaccagatgtaggtccaaatatcaatgacatgatggaaaatggaagtattaggtagacaacatctaaagcacttcccccaaaacctattggctgaggagtcctcacaagcactggtatagtttgaaaaacggtgaatgtaactattccccagataagtatgatgatgtttgttagaaatatcggttttagttttagcaattgaagattaattagaggaacagatacttttcgttcgagcaatatgaaaacaaacagtgatacaccgctcaatgcgaacaataaggtcgaaattgatatacctgattttacactttcattattttctgattgaaccaatgttagtgctgaaataaatgatatgatagtaacagcaagggtgatggttcctttaatatcaaaatttgaaactactttatgggattttatatgcctgtgatttgagctgagatttgtaatatcaatagataactcccatttgttggcttccttcacaacgggagatttatcttttattttgacaaaatactttatcacgatggttacaataattgtaaacggaagtatagataagaaggtcatgtgccatccaaaattatgtgtaatatttcccccaatcattaatcctaatactcctccgaaagcaaacatagatgccagtgttccttgacttatagctattttgtcttttggaatttcaatttggataattgcaaaaactaggggaaatacagacatcccaataccttgtattatacggaaaaagattaaccaaaaaatatcattagctaaagaaccaccaagaattcccactgtataaattactaatactgtcaaaagaataagtttccgtccgtacaaatcggatagctttgacactatggttgtagaaatcaatgcagatattacaaatgatgcaaatatccaagaggacatactataagaaatattaaactctctaatgatgtctgggattgcaggtaataacattgtttctacatacattaccaaaatggagatggagctcaaaatcaaaaggagcttccaagacgaaaaagatgattttttcatttctagcttacatttttctccaaaaatatcattacaggcgaatcatctaaggacagtcttttaaattcatgataaccatgtttttggtacaggtaaatatttttaatacttttgtatccggtaaatatttcttttatatcttctaatgacgctacttcaatatggacgtcatttgcttttaccattttcatgaagccgttatcatctatgaagaaattacaaattatttatctgttaaattgaaagagaaagcctacatgaataaatcattaacacaaaaactacaccaaaaaattaagtagatgaagtttgggactcgaatccataccatataatcgcggattcaaataataaattatttcagaatcgatttgatacaaaagtggtataacatcatatcattgtacctactataaatttcagcctcgtaaagtaaggaagggtattattttcaatttttcatggcaccaaatcaaatctaaagtgaacaggtccaaaaagcaaataaaagaataaaaatctgaacaagcaatttcatgtattaagttgaccagtacagagcatgctttaagattaagacctggagtcatagatgatgcgaaggaggttgggaaaataatttttgaagcattttcagggattgcagataagcatggctttcctcgggagtttcctactgttgatatcggaataaatgtagcttcttctttgctctctaaccctggattctattcagtagttgccgaagatattgagggatacggtaacaaggtcataggaagcaactttttagatgaacggtcaaatatggtgacagggattggaccaataacaattgatccaaaattccagaataaaggagcaggtagacagttaatgaacaatgtaatggagagagctagaagtaagaactatccagcaatacgtttgctccaagcgtcatatcataaccgatcacttgcgctgtataccagcttagggtttgacgttagagagccaatatcaaccatgcagggaaaaccaatttcagtagtcattcctggaagaacaatacgagtggcaactgagtcggatttggaatcatgtgacgcaatctgcagagcaattcatggtcacgatagaagtggtgagctaaaagatagtataaaacaaggtattgccaaagtagttttacatggggacaaaattacaggctatacaagtggattgacatattttaatcactcagtaggtttttctaatgatgaccttaaagcgcttattgcttcagaatcaattacgacagctgatagttatggaggacctggtattcttattccaactagaaatgcagagttattccgatggtgtcttgacaacgatctaagactagtccatcaacttaatctcatgactattggaatgtataatgaacctgctggatactatatgccctctatcctatattgaaaatcactgatagtagtcagttaaatagtaacttagtatactaaaaaattcaaaaataaaacagacgaagtttgggattcgaatccataccatataatcgcggattcataatttaaaattttactagactctatcaaaaatcattagcatggagagcatgggatttgtttacataacaggcagtcatgggtttatttccgtcgacagtaattgcattagtgaaagttaatttcattctgttcagcaatgatgtatttacaaataatctcggtgtttcctattgaattttcaaacagtttatccaaagattttctaatatacggtttttgatatttgcagatcgaagtaattggttcttttatcatcttctctcttgaattaaatgaagaatactgtgactgatctggcttttgcaaattatcaattttattttgtctctttaagttaataaaatatttatatgaatccacgttttaggcgccgggagtgggactcgaacccacgagtccggaaggacatcagctatctatcctttacttcctcttttattagatctcgaggctgaccccttttagggctggattttttgattgcttacctagcttgggtaccccggctttttaccttacatcactttgcaagtgttatatttttaaacttatgttaataatttttatttctccataaataattaatactctacattattacctaagatatgctttcattaaatatccaagggcctactctagctactgtaaaagcgttgtctcttactgatctagcaatcatgtcttattctgcacacatattaagaaaaagattgactagtaacttcaatatagattgttttacagcccctgatccattttctgaagagaatgaatttaactatttcatagttatagacaaagcaaatactaacaggattatttctttcattgcattaaaagaagttcttgatattgatttatgggatttactctttggtaaagatatgttaagattggatatatcaaaagaagatgcattatctttaaaacaagaattaatgcctaaatatactgataattttttcccgattcgaaaggatagctccataatcgggtatattgcttttagtttcgaaatctgtggtatgaaaaattaacgtacctgttattactaatggcaaattccattgtattttttaaggacactattatatctgcagatttaacgaaattggtaattccaattcaccattttttagtatgattattttcaaatcctttaaaatttctcttgccctagtaattccctctctctgaataatcttatatgctatgtccctcctaaaggaatcggaccattcttgtccgattttatatttaccgttaattgtatcaactttaatttttattactgttagatgtataatggattttgcatcttgatttaattccgtatacttgccttcagattgatatttttgcatcatcttgttcattgcaattgctttttcttgattatcagatacaatagatgcttttccttttattactatacttgtatacaatgtgtccgcaaaagaagcatcggtaggatgaaaatagtatgaaggtaaaaaacaaatttccttatcaacctcaaatcctactttttgatttcgcaggaggttctcaattttctctcccctgtgatgggaatgcatataaattacatgttcataaagaatcgggtttttggtagagacattatttactatctttatatcattgcatgtattttcactctcgccgtcttctcgacatgttggcttcccataatcaagggtaaaatttttaccgcttacatctgtaaccgtatgaacaaaattcattggaattatttgaggatatccgtttacgtcaattgttgctaatcttccaacatgtacctcgttcaaaaattttattatgttattgatattttttattctaaatctggatgttaattgcatttttctgttcttgtagaattaaaaaactgacaatttagattcattcctctttcattccccttcttctgtagtagtaactggagaaattctttctttccttgctaaaaatattaataaaatcccaaatagtcctaatattaatgataaaccctgagcaccgccatagggtataaatatataataaccaatcgaaaagcaaaaacagattatggcttgcaagacataggtgatggtctttcttaaatctatttttcttgtgataaagcctattgcaaaaaatgctatactgggatatataatcaacagaatatactgatctatatctatgccattgtgtgacatattgtattctatctttttgtattaattaagatatcaaaaaatatgccaaaagtaaaaaattaacggtatgatttctgttttcttcgtcttgcccctgggccgccatatttctttgactctgtttgtcttggatcccctactagtagatgtctatcaaattctgttatctttttcttgatttcttctctgacgtttcttgtaaatggatgatcccttggatcttttgcaccttttgtttctcctgttaatgcacgtgaaattgctactgcactggcaaacgcttgtcccataaagccgccgccattgacgtgcacattaacatcaactctctcccttagttcaccaattatattagtaggtgttaaaatgagttcctttgctacttctggttgaataacttctacagggatattgttaattctaatttttccatttccctttactatggtagctacggctctacatgtctttctttgccccggataaagatctattttattcatattattgaactactcctttccaacctatctgttttgccacgtcactcatagatatgtaaaatgattcgggtctcgtaatttttgcgtcctcaaacgatatcattgctgaattttttaactcatctggtacgcccatatatacccttaatcttttaaaagattgcattccactggactttctttttgggaccatgcctcttatcatttttgtaattatggtgtctggtcttcttggatgaaacggaccatgaattgggttaacaattgatccaacttctaatcgtttcttgtaactctcgatgacttcatatttgtttccggataccatcactttttcagcatttactacggatactctgttaccctgcaataataattttgataccttcgaacatagccttcctgaaatacaatttgttgcatcaactactataagcttattttgttgagattgaccttcttctggttttgtctccaactttgtttccttagccaattatttttacacctttaccatcaggatatttacttattaatgattgcaatgaaataacttctgcccctgcagtgttcaatttatttatggcagtttctgaaaatgaatatgcatatactgttaatttgtgtcccagcgttccattgcccaaaatcttccctggaactaccactatatccccattattagtaattttatccaatctttggatgttaacttgtctcctgtttgatctagatttggaaaattctttctctaatgctttccaaatctgtgccttgttacttttaaatgctttacgtagaatccaaactgtattatctattaaagtatcgttaaacattacttgctattccaattaaaaagagtataaagtaccaaataaatttacctagaggttgtttggtatctggagtgcgttaactgtttcgccaaagtcttttatgcttttatttagttgctcaattgctgctatgattatttcctctgcagttaatgctccattagattccacagtcaaaaaaatttcattttcattttcgccatattttactactgctattgtagcaggctgccattttgcatgatccctgccaaaccccagcctcgcatatgcctcaaactttaatttttgaccaggagctagtactatgatgggaatatcctgacttacaggttttacaaattcatcttctgaaattaactctgaagtagtaattgttttagttttttcattagcttctgcatcaagttgcaataatactctacaattcgtacaacccaaggaactcttacaactgcattcttcgggcaatgaaaatttcttcaagtcagtccttagtggaattaaaccaagcctatgagcaactgcttcatcatgcattactgatgaattttctagaataactacgtcatcaatagcaaaagtaggcacctcgctaattgatagtcgtctaattgcatttacatactgacgaggtacgttattaaatttaatggttatcctttcatcatgtttctcaataacctttaaatctatggagatcaaatcaaataattttaatcttacgtatattaaaaatgtaatgaatctattaggaatgttgtaacctaccaagcatgttattatattaatatatcacagttaattttctattgtatggctgattcaaaagttactgttgtaaaattaactattggaaatgatagatttgaaattttagtgaagccagatcctgcattagaatataaattaggtaaacgaaccgatttgtcttcagtattagtctcagacgaaatatattcagatgcaaataaaggatctcgagttgccgttgataaattaaataaacatttcaaaactagtgactctaatgaaatacttaaacaaatattacttaaaggagagctaaatcttactacagatcaaagacgcaaaatggtagaggacaagcgaaaacagattgttcaatacataaataaaaattttgtagatcctaaaacaaaacttcctcatcctgttcaacgaatagaaaatgcactagaagatgtaagagtcacgatcgatcctttcaagaaagccgaagaccaggtcaaatctatagttgactcgcttagaaaaattcttccattaaaatctgaaatgttgcagcttgttattcttataccaaactcgttttcttccaccagttataattatattaaaagctcaggtgttctaacttctgaagaatggctatcagatggttctttaaaagtaaatatagaaataaatgccggtatgaaagggaactttctcgaacgcataggttcattgactaaaggatccgcacaagttaaggaataactacttacagattatattatagaacaaattctagataattagatatagaaatatgaaaacatttcattttacatctattttgttaatggaggtagacaatatctaaaatgcaagaaataaagaggagatatgttatacctggagataaaattattgagggtaattataaacctttgatgaatgttattaaaagtggtaattatttggtatctaccagagttggaattgctgaagctggtaaagatggcgttaaagttatacctttatcgggtgtttatataccacgtgttaacgacttagtaatcgggaagattattgatcgatcttctttatcttgggatgttgatattaatgcatgctttttcgctcacctgcccgcacaagatgtatttgggcgagatttttcaccagccaaagatgatatgggtcgacaactaagcataggcgacttaattattgcaaggattgtatcttttgatagaactagagatcccatgcttacagttcaagataaggatttaggaaagatcccttacggtgaattcataaaaatttctcctactcgagttccacgattaattggaaaacgtggttctatgattcaaactatagaacaagctacccaaacaagagtgataatcggtcaaaatggtatagtagttgttacaggcagagacccagatggtctaagtttggctgcaaaggctattaaaatggtagaggaagagtctcatactaccaaccttactcaacgagtcaagactttactaaatgttcaagaccctgttgatccagaacaaccagaatcaatgaatgcttcttccaatcctgaatcatcagcacaaccacaaccacaaccacaacccagcgatgaatcatcagcacaaccacaaccacaaccacaaccacaaccacaaccacaaccacaaccacaacccagcgatgaatcatcagcacaaccacaaccacaaccacaaccacaaccacaaccacaaccacaacccagcgatgaatcatcagcacaaccacaaccacaaccacaaccacaaccacaaccacaaccaccacaacccagcgatgaatcatcaacaccgaataatagtaaatctggctccagtacaaaggaaaaacatcgaaatgataattctgaaaagtcatccaacaacgatagcaatagcgatcaaaaagaaaaaaaacaagagtgatcaaataggatgtgtataatttgaaagagttagctttaatggatgaaaacggaaaaagatctgatggcagagggatagatgaattacggtcaatcaagattgccgtgggcgtggtaaaaaatgcagacggttcagcttatatagaattcggaaagaataaaataattgtcgctgtttacgggccacgtgaagttcatccaaaacatatggctcttccagacaggtgtgttcttaggtgtagataccacatgtctccattttccacagacaccagaaagaatcccgctccctctcgacgagaagtggagatatctaaagtaatgcgtgaatctttggaaccatccttaattttaagtgactatccacgagcagtaattgatgttttcgttgaagtattgcaagccgatggtggatctaggtgtgctggcatcaacgcggcatcagtagcattagctgatgctggaattaacatgcgtgatttagtttctgcttgtgctgctggacggttatcagacaatattgtactagatattaatgatcttgaagataaagaaggagatgcagatatgcctgtagcttatttgcccaatttggaacaggttactttgctgcagttggatggtaagttaactacagctcaatttagtgaatgtttggaaaaagcaatcactggatgcaagtcggtatacgaaatacaaaaagaagcattaatgaaaaagtattttggtgatgaaatggagttgaaagaagaagcatgagctcctctaaacgttctacagtaatagtcgaacaattacgaaaacaacaaatgctagaagctttgtcaagagggaaaagattggatggtcgcgattttgaatcgtacagaaattttgaaatagaggtaggaataatagacaaagcctctggttctgcaaaggtaaagctaggtaataccgaagttatagcaggtgttaaagttgaaacaggcgaaccatttgaaggattagaaaataaaggtgcattgattatgtctgcagaagttttacctactgcctctccccatgttgaacctggacctcctgacgaggacgcaatagaattatcaagggttgttgatagagggatacgcgaatcacaaatgctagatttagataaattggttttgattcctggaaaaatagtttacactgtttttgttgactgtagtataataaacagcgatggtaatttgttagatgctacctcttatgcagtagtggctgctcttctaacaagtaaatttccgatctatgaaattaaagatgaacaggtagttgatactggtaaaactatgcctccacccattactacaatgccggtatctattaccgcagttagaattggagaatcggtcttgttggatccaacaacagaagaggaagcttgcatggatgcccgcataactatgacaacccaatccgatggaaatatagtcgctgtccaaaaaggctttacgggcccattttctgtcaatcagattgtccaattctctgaaatagcaagaattaaaggagaggatatgcgctctaaaataaaggagttgaattaaaggttaaaagaaaaaagggttcaacagcactaaaaggtttgggtgttaagtttggtgctaccgtacgaaaaagatatggtaaggtctatagaacattaaaacaaaaaagacgatgtcctagctgtacttcattaaaatttaaaagagtagcgatgggcatatggcgatgcaataaatgcgaatataaagtcgcagcaggagcctatgacgtaaatcttggaaagcttcaaggctaaaatttttatttattttgatgtagaatatattaaccacaataaggggtttttcccatcaaataacgatgacggtgataatttaaaaaaacccttgaattctatttttgttgcattaagaggcgatattcaatccactcctgattttgatactgatgttactgtttctatagaaaataaccatattatattgtcaatatccggtaacaatatgtctaaattccgtgcgtcattactatcttttttgagactagtagagttagcatattctgtactgtatattgacaaatgatatagtagtgtaataatttttatcttagtgaatatttagttactttgtattaacaatgagtgaacaagagcttcctccatggctaaaagagcaacttgcaagattgcaacaattacagcaaaaccttcaagcaataatgatgcaaaaacaacaggttgaactagaaatatctgaaacagaaagggccttggaggagttaaagaaaactactcctgatgatgtcgtatacaagcttgcaggccctttgatggttaaatctgatagggataatttaataaaagaactagaagaaaagaaagagctttcaaataccaggactatagttttaggcaaacaagaatctagggtcaaggaaaatctaaaagaggtggaaaataagattaatcaaatgatgcatatggcccaagggggatcacaatccaataaatttaatcaacctccacaataacaacttttttcttatgaatgttaattaagaatatgcttttttattattgcattggctattcggattgttgcagatgagcgagagaaaaatagtcgagttcctaatttacttaaactcagtggggtatttgtcgattataaacaattagcagttggagattatattgtttcctctgagaccgttattgaaagaaaaaccatatatgatttgataaattctgtatatgacggtcgcatatttattcaatgttcagatttaataaatcattatactaagccattgattattatagaaggaaatttaacagaccttgatacaagagagcattttgaaaatgattctaaattaattatcgataagatacgagtagcatacgaaactttgataaaagtagcacttgatttccgaatcccaattttatatactgattctgtattttatacagctgaattgttagttttactagcatccaatcaatttaggagcaaaaacgatggacctttgcttaaaaagataaaaaagtcaaatccatttcttcttcaacaattatatgttcttacctctttacctggaataggttctaaattagctacaagattattggatagatttcattctcctacaaatgttttgaatgcttcgatagcagagcttgccagggtaccaggtcttggaaacatgcgtgccgaaaaaattcgaaagattttggatactcctgtacccaaagaagtaagtatctatacccaaaaaaaattgatgattgataatacagacgaaaatactggtgatgattcgcgtgagaataacataacttgaaaaactgatattgccagtataattttattcgtaactattaaccaaaaaagtctatgccgctaatgacttctcaattacggatattactttatcattcatctcagtatttcctatcgtgattctcattgctccattgtagtttccaaggtctccaaaattctttattagtattttttcatttaataattggtttttgattttattgtagtgattaaatgtttgaaagaaaaagaagttagaatctgacctaaatattttgatcttgtctaatttatttagcctatcaaacatttttgttctttctctctttattgcttttatacttctatttacaatctgaatgttttcaagtgcttcaattgccaattgcatggagaaactacttaatggatatggtaattgaatatattggttgaaaacatctgatatttcttcattagccaagatatatcctattctggctccagccagaccaaaagcttttgaaaacgttctcataattaaaacattacgatattttgttactatatcagataaactatactccgcaaattccacatacgcttcatcgattattatcaacttgtcttttaaaatatctattatacttgaaatatcgtcaagtttaaattgatttccagtagggttattcggtgatgctatgtatattatatcatagtctctagctttcttgataaatagttccaagtcaaaggaattatcaatagcggaaagatctattaatttagtgggtattttatacagattacatctgtctgtaaaataagaaaatgtagggtttattgttatgactttttttcctttacctattgttgacaataataaatccattatttggtcagacccactacctatgccaatatttcttgtacttagtttggtataatctgctaatttcatatacagtttttcaaattgttctaatggatattctctaaaatcgctttcatgaagagattttgatgcaattgcttttataaatctccgttctaaaattaaattttcatttgaatctagtttatagaaatcatgaattttttctggccttttataaggtttgtgtgatttaatgtgggcaagttccttatctaaccaatccaccattattttatccttccatttaccgcttcatagtgattaaataatccttctgttgatgttatttcttttatgattggagcgattttctttaaagcatccctattcatttctatcacatttactagtttaataaaatctaaaacagatagtgctgacctcgattttgcaaatctataagttgggagtacatgattagagccaagacaataatcgcttacagatgatggagtgtattcgccaattaatatcaatcctgcattataaatctccttcaatatttttttatcattaattgcaaatatttcaaggtgttcaggtgcaaattcattaatgaattctgttatttcttcattattatcacataatgctatgaatccattatcatttatacttttttcaacaaattctcttctaggtatttcatcttctttaattattctacttaattcttcagaaatctttgtggccaatatttttgatttcgttactaccccgcataatgtatcttcactgtgttctgcctgagagatcaagtccaatgcaatataccgtggatttgacttttcgtcagcatacaccagtaattcggtcggaccggctatcatgtctattgatacatcttttgataccactgactttgcaacagacgcatacacaccacctggtccaactattttatccactctttttatagtctttgtaccataagccagtgctgctattccgtacgcgccacctaccttataaaactcatctacaccacagatgtcccctgcaacaagagtcaaagggtccacctttccatttttcatggatggtgtaatagccactatttgttttacccctgcaacttttgctggtatggcacacattactatcgtacttggatatctagctttcccgcctggaatataacatcctactctgaaaataggcattattgttttgtttatcttgattccatccgaatcaattttaatattcttgagattatcgattacagctttttcacttttctccaacttggatttcatgtattttattattcttatttgcttggctgagacgttttcatatgcttctttaatttcagacttactaacaacaaatgaatcaatcttaacgttttcgtatttctcaatacattttaacaatccttcatctccgtttctttgtatgtcatcgatgatttttagaacattctttgttggaattgaaagatccttattccaagatctttctcttaattcattagcttgttctcgtggttctttaatttttataatcttaatcaaattttatttcatctttatcatctagaatgatcttatccattgatagtatttgacttggttctaaaattaccaacccttgagcaacttttctgatagttggtataagtctaataaactcgttcttgtctattatggtatttactccataccatccctctttacttaaattactaatagttggacctttcaatgacgggagaatacgtaataattcttcaagattgtctttttctacattaacgaaaatatgtaatttttttcttgcttctactactcctctcaataagacaatcatgtctattattttttccttttttataggatcctttagcgcatctttatttgctatgagtactgctgtagattccattacttgatctatgatttttagattattttgaataagggtggttcctgtttctgtaatgtcaaaaactgcatcgacatcttctggaggttttgcctctgttgctccaaatgatagaaaaatttccaccatcttattattacccgtcctagaccaaggagttactattgtgggttccagatctccaaagtgtttcttataactctcctttgattttatgtatgaggatgctgattttagatattccgttgaaaatctcaaagtctttttgttctgagcaaaattatctatcaactcatcaagattgttgaactcgaaaaattctggaatagctattacctgcttaactttaccatattctaaatctaataatactttgacatcagcattagtttcccttatccagtctttgcctgttattccaacatcatgaaatccctcttgtacgtacgtcggaatttcctgaggtcttaaaattttgacctctatgtctgggtccgcaatctttaccctgtatattctaccccttccgctaacactgcattgccatgcctgttctatcattttaaaagtagcctcttctatactgcctttgggcaccacgaatttaataagacccatatttgatacctatatcgaatatactaattattacgttgtttatttgttttattaatccgattttttattctaccgagtcataatgctagttttcttttaatgattctagaatttccttggctcttgaaaccgatacatttctctcttcaaccatttttctggagaccgtttcaattttgtcatttgtagctcctgcgattattgcaatattttttgagtgcagtttcatatgtcccttctgaataccttcgttagataaagctcttattgctgaaaaattctgagctaatcctgaagcagcaataatggttgctaattcctgcgaatttgatatattcattaatttcaaacacgctttaacgataggatgtgtgtttgttatccctccaattattcccaccgccattggaatttctatttctcccacgagatctcctttagaattttggtaccatttagtcaaagatctatatcgtccatctctgcacgcatatgcatgacatcctgcctcaatagctctaaaatcctgaccagtcgctattgctacactatcaatcccattcataattcccttattatgagtaacggctctatggacgtcagtgaacgctagtgaataagcaaataaaatccttttaagaatttcttgtccaccaattaattctgtcggaaatacagctctacattttactaggcgttgcgtcgcataattagacaaaatttttagtattaccttacatcctgttaatgcttctatttcgggtgcaatagcttcacacatagtattaacaacatttgcacccattgcgtctttggtatctaccatgatttctattattatcatcagtccgagtttgtttatgctttcatcattgacttgtttaattttaatgtctaaacatttcgcaaatttgcttttagtatttgctagagatattatttcaatcttattatttgatatcaactcaattaaactttgaactcttgtttgatcgtatgagctatttgggattaattgaatttgccctatcatgatagaatcatcagcgtgagccgtaaaacctccacctttacttgctatctttgcggcgttgcttgcagcagctatcacagatggttcttctattgccatcggaactaaatacaccttattgttaatgacaaaattgtctgctattccgatagggagtggaaaaattccaatagcgttttctatcatcccatcgatattattaaatttaaatattgatgtatttctaaacaaatcaatttcgttatcatccaagcttgtttttactttgataaattgaagtctttcttcatgagtcatatctctaaattttttcttatccaaatttttactcattttttactcatttttaactatttttaacaatttatcgacggcaccaccaccgttatcaaaaaagtctctattgtttgtaatcagatataatgatccatcgctatcttctgccacatctttgattttaccatatccggttaatattgaagattgatcttttgatataggatcaatacttctcaaatgttccccttttaaagtagccacaattaattttccatagtaatctagttccgtagaattgcttatcaaaattccagagggatatatagaaggcgtaaaacaaaattctgcattaatgaataaactttcttctaaattaccacattcttctattggccaaccatagttttcacctgctttgattacgttaatttcatcatttccaatcctgccagcttcactagcatacattgtattattgttaaagtcccacataatacctacaacatttctatgtccataggaataaattgaagagttaggaaatgggttgtcattgggtgtggttccatcatcgttaatacggagtatttttcctgccaaactagataaattctgagataactctgaatttgtagtatctccaacacctacgtacaattttccatccggtccaaactttaatactccaccattatggagttttgaagccggtatatgatcgattattgtccctgtttcactaagtgagttatttttttcttgtaatcgtataaccttgttgaatgtctgattttcattatttttataagtataatacagatacaaataatgattattaacaaattgaggatgaattgccactcctaataatcctgcgccttcatcaaaataattatcctttacttcgtaattgttcaactgagatccgttactattgagaattaatgtctttcctgtttgttctgttattacgattcttttatcaggtaaaaccgctacacccgtgggaaactctaaaccatccgctataactttgacagcagaagcgctatcttctgcatacggtgaaggtaaaaggatcgttgtatctgagggagtatttagtattgttaatgcacttattattacaactataattccaattactatgactacatacttattcatcatattatcttatgagctataagttgcattatagtcaatataaaatattattctataacaaattgagtactttatgtttctatatccgcggcaactatgctaactgctaactactctctttctggttgacgtacaactcataactattgatttttatatttatttttattttcttttgatttggtccatatatttttagaccgtatgctttttcatccttaattggaaaatgaagaggatttagtagatcatatgaatcaaaattaaaaattttcagcgcagatgaggagatttgaactcctgatcgccatacggcgaatcggctttcttttaatctaccttgttattgactcaaggccgacgcattactatggtcctaataattctgcattaggatgaccactctgccacatctgcactaaaattaattattattgccctctattatattttaacacatatgtatcctaccctttaggagaaattacggcctctgcctctacaccgaataccatggtttgtgcttaatcgcaaaatggcataaaaaatctagttaacgtttaatctttctgtattacccgataaattgttagttcattacaaaagtttgtagttttatgatatttgaatatcacaatcacaatttgatcaggtttttaatttgtcgatttaatatttattgatgagctttaaatactgaactaaacaaaactgatacttttctaattatttaattccgtttattactgatttttatatctgttagctaataattatcaaataatgattccgataaataagccgtggttggatgatgatgctaaacaagaagtcatgaatgtacttgatgaaaatgcattgacttctccagctaagaatggtggaaaacgggttcaagcatttgagaatctcttaaaatcgtatctcaaagtgaagcatgtaatagctgttaattcgggaacatctgctatacatgcctctttgttgtctttgggagttaaaccaggcgacgaagtacttcttccatcctttacttttgtagctacggccaattcagttattgctactggagcaaagcctgtttttgtcgatataaacaaaaatgactacacaatagacgtttcagatattggaaaaaaaattaataacaacacaaaagcaattattccagttcatctttacggtcatccctctgatatggatgagatcaattctattgcaaaagataattcattacaagttgtagaggattcatgtcaatcattaggttctttgtatgatcaaaaacaaactggtacaatgggaaatttaggttgttttagtttttatgccagtaaagtgctcactactggtgaggggggggcaattgttactaacgatgacagtctgtatgaaaaattgctaatgataagaaaccatggtatggtaaatgggtatgatacggagatatttggtctgaacttgaggttacccgaagtaagtgctgccatcggaattgctcaaatgcgaaagctagacaagatgctacaaatgagaaaaacaaatgctgaattattgcttgatggattgaagaaatttgaacaaaaaggcttactcacattgcctcatgaacctgagaataagaaattcaactggtacctctttactattgggttcaaggaaaattctcaacgagagttgatcaaaaataatcttattggggaagaaattggtgctactgtatattatgatccaccgatacataagactccttattataatcactctgatgatcttaactctgatacttttctctctaatactgtttgggcttggaatcatgtgttatcattgcctgttcacccgctgataactgaaaccgatattaacaaaattctaaaaacatttgagaatctacagtgatcaagaatactatacgaattagtttaaactggtgttttctctctataaaatactatttttataatggttattaaatcggttctaatgtaaatgaaattaaccatagaaaaagacgaacttctttctaggagattttatctcgtcattttttatttatgtgcatttgttatggctgcaattacattttattcattatatgtgagtctttatgaatatttgaatactggaaaggtcataataggggaggtattggttaataccgaatttccagtaaaggggctagcaaaattggtaacctatcttatgatcgtttctgtggtagcgtggtattgcgttactaaactcggagaagataaggtaaaaaatgtcccaaaaagtataagatccattttgcaattgatagttcttgcaatactaataatttcaatttatgaattcttttataattttataatatggaacgcattaatcactgctgacttagttaatggtgaattaagattggacgatttatttatgccctaccctaatcctaataccccgtggaacttggtatttgctacaaagatgtctttggccgctttgattatttctgctcatggtttctacataatatcgaaaagaatctgagaatctgagaaagccagtggttagaaattgatacctttttaattcttaattcttaattcaataaaccagttagttatcattattaatgctactattattattactgccctgtttaattcattctcgaaaacttgcaagccaacctattagaagcaaataagattttattacagaaaattgaaaaattttaccatgggtaatattgataaaaagggtattcaattaaccgaaaaagagtggcaagtaatacttgattctttgagcaatacaatttttaacgaagaaattactgaagaagccagaaaaaatgctaaagatctgtttctcaaaataaataaaaatatctaaatttattgtgtttgactagattacttacaaattagtagatagattacatttggacataacatgcaagatagagtttccattttgatcctttttgatggtttatctattattacaaccgaaatttatcatatttgtagcatcttgagtttctttaccacttactattaatcattagttggatctattctcaattatgattggatgtgttgagttgagtacaaatcggatgtcagaaaaatctattgtagtattcctaaaattcgaataccaaatgtcaattttgacaatcaattcgaatagattctttttctgttcaattaaagcttttatatattatatgtatacgaaattcctgtatcgttttatgatggattgattgattgattgtgactttaatatattaataatttaacaaacaactaggtgacatggatagatgaaaattcatggtcagtcgtcacatgattccgactaggcaaaaataccttatttaaccattctaagaatatcttcaatatcaattataatttcaaatctactttgtaagtatatttctaatttgctttactaaatccaatattctatcaatgtcgattgcttctggattcagatctatatatttataaagaatttctaaagcttgctgatattccttatttctatataggattatacctttgtctctgagtgcttcagaactagtgctatccaaggagagaatcatttcgtttattttcattattttgtctaaatcatctacttccatgtatccatttttcaaattattcaagaccctgattatgatttgtagcgaatttgtcttcttcatcaaatcgctagtcaaagaaatggtagacctaggatatgccttgttcaaaagatcttgtaagacgtagtcatccatgattcgacccttgttgaatggatcaattactatagattcgtccgaatcttcgtctagtatatatttgactaaaaagtgagatggaaaattgacgggatggagtttaaaatccatatagctagcaaggtggatatagattaatgatagcgttattggaattcctgtccttttttctaatactatgtttaaataattattgacagggttataataatcactaatatttggttgaaattttttatcatcaaagaaaaaatcattcaatttttcaataatgtgggttggtctcataccttttgtattttttatttgagaggttagctcttttcccatctcatttatcatgttcatgtattctgatattttcaggttgggataatcgataattctagcaatatgaagtacatattcagttatctttactatgtcatcattttcttgcactttctcaataactgtctctttccaatctgctagatagtctttctctatcttatcttcaaaacccaatattagtaaaagcttgtttcatccttataagtaaaatccaaaaaaatgtatcatgttacggtcgtcgaaatattgtcaatgatttttatcatacactttgtagttttttcaagaaggtcgatcttggcaaattcgttgggcgaatgtatccttgaaaatatgtaggtcccaccaattgaaatgcaaggagctttaagtaaatcaataaaatcatacataggtccagtacctgcagatgaaattgatattattgaatctccaaaaatttcatttgcagatttttcaattatttttacatattgattatctaatgcagttcttccagcggcttctccatgaataagcgtgactttgatatcctcaaatctgttttctactagatgtttctctagccttttaaactgaagaccagggtccatatttggaaccaaacgaaagtcaatctttaccattgcttttgaaggcgttatggttttcgcacccggtcctgagtatcccgaatttaatccagctatattacatgttggttcactggtcaaagctttctttactcttttcccgctaatattattgataaatttgcttattccgtattctttcttaaaactttcttcatcaaatggctcgctgtctatgatcaaactttcctcttcagataattctttgacttctttaaaccaatcctttatcaaaatatttccctctctatcgaccaatgttgataatgcttggacaattctcaaagcaggattttctatcaaaacagctaaactagaatgaacatctctagaggcaccttgtgccgtcaattctacgtataaaagacctttcatccccaaactgataatgggtttttgttcctgatcgatatatccaaattcccaaataactatatcggtcttgaattttgtattgtatttttttagatattttgatatattcttacttccaatctcctcctctccttcaattagaaattttatattcattggaacatcgcctctttgttttagaaaaaactctattgcttttaatctggttacaagttcacccttatcgtcggaagcacccctcccataaatcaaattcccttctactttaccttcaaacggttcatattcccataaatccctaggttcttctggttgtacgtcgtaatgattataaaataataaagtcttcccatttggatttgatttggatttgacttctccataaactagtggaggaggtgcagaatttttctgatcatcataatatatcaactctgcgttgattcctattcttttcatcattgcaacgatctccttggcacactcttccaagttttgctttcttgcagaaacactcggaatttttatcaatttctgaagatcgcttatcagtccatgagtatcaatatctatggtcaacttgtttgaagacatttagctatgatgataaatatttctttaatataaaaactaaatttttttaatatttttataacctgatgatatactttttttattgagtaatgaaaatttaaagaacattttcctttcaccatcttctattgctgtaataggagcatcagaaaaacctggagtaggtaaagctattttttccaatatattgagcggctataggggaaaaatatatccgattaccccaactagttcatcggtatctggcataaaagcctacaaaagcgtacttgatgtagatgacaacattgaccttgcggtagtcgccaccccaaatagaatcgttcctgcagttatggaagaaatagggaaaaaaaatataaaatcttgcataattgtttctgcaggctttaaagaagttgatgaaactggtgcaaaattggaacaacaagtacaagatgttggtaaaaaatatggaattagaataatagggcccaattgccttggaataatgagtcttaccgatcaaaatcttatgaacttaacatttttgaaaattactcctaaacatggtgaaatagctcttgtttctcaaagtggagctatttgcgcagctacggtagaggatgcaatagctcagggaataggattttccaaagtaattagcatgggaaacaaggtggatatgaatgaaactgatatacttgaattattagaagatgatccttataccaaagtaattgtgatgtatttagaggatattcatgatggccgacggttcatgaatacttctaaaagaattactttggaaaaaagaaaaccaattattgttttaaaagctggtaggactccggaaggcgccagagctgcaatgtctcatacaggtgcattgatgggttcagacgaagtatacgatgctgtatttaagcaagctggtgtgattcgggtagatacaatgcaggaattatttgaattagcgactgctttttcaaaacaacctttaccaatgaataatatgggggtagtaattgtttctaatgcgggtggacctgcaatcatttccaccgattcttgttccaaatataacatacaaatggcagatatttctaattcgagggaaagaatatctaaagttatcccgccgcatggatcctcacgaaatcccgttgatatagtaggcgatgcagatttcaataggtttgaaaaagtattgatcgaagtattgtctaattctaatgttgggtctgtagtaacaatgtgtaccccatctgcgactttagattataatgaattagccaaaacaataattcgaacatcaaagaatagtggaaagacaatgctagctgcattaatgggtttggctgagggtgttgaaaacaaatctatattgtcagaagggggagtacctcattttatgtattcagaacctgccattagaacattagattcgatgtataggtttggtaattggttaaacagcaaaaaagaatctatatcatctttctcagttaataaggagaaggttaaggatgttatatctaacgtttacgaacagggcagaacaaatcttttggaagatgagggctatgcggtacttcaagcatatggatttccagttccaaaaagtatgctagtaaataatgaagatgatgctgttaaatctgcaatagaaattggttatcctgttgtcatgaaaatatcttcaaaagacattattcacaaatcagaatcgggtggtgtaaaagttggtttaaaaaataccgatgatgttcgaaatgcgtataattctatcatgtctagtgtaaaaaattataatccaaacgcaagaattgaaggcgtgttgattcaggaaatggtgaccaattccaaagaattaatccttggtgcaaaacaagacaaattatttgggccactgttgatgtttggattagggggaatctacgttgagattttgaaggatgtaaatttcagactggctcctatttctgaatcagaagccagggaaatggtggattcaatcaaaacaatttctttattgaaaggtgttagaggtgaaaaatcatcagatattccatccgtagttgattgcttgctaagattatctcagctaatcatagattttccagaaatcgaagaatttgatattaatccgttactggtcctagaagaaggacgtggttcacgggtagtggatgtgaggattggattaaaaaataaataaataaataattatttcattccaattttttgccacattcttcacaaaaaatggattccgcttcattattgtatttgcaatttctacacgttttaccatctaattttgctgttattgacgatgtggatgaggaaccattgatgtctgtattactattaccactactaatgttatgaatacttccagaacctcttgatttattctcgttaggtgaattttgatctgccaaaataattatgtctcctattttagaaatcttgttccattctatttctttaatttcattgtttgaattttttatcttgaaactaaattcaacatttccatctaataattttcttaaaccaatttcttgtactttgccaattaagtgtgcattattatcataagttgacattccaattattttttcaatatgcacatacgtggatttcacatctgaaatggcttcattattgttgttttcagtttgattgatagaattactcgtattgctctcgccctcgtttctattttctgtttctaatacttcatcaagtctgtccttctcttgctctacttctcttccccctccttcttgtacttctttttttgattcaagattagtattatcttttgattcatcaaattttctatattgtgctataatgtaatcacagtttttgcatttgtattctcctttttcttttaatattatgttctcacccaaatcttcgttggggttttcaaattcaagattaggcgctccttgatattctttttcacatttgttgcaataatattttttaaatctgtctttatctaacttgcctatgcctgccaaaaaaagttcaggaccacccaagtttgctttcttttgttcgtcgtcactaacctttgcaattgcatatcctccagaacctctcaattttttttctacaaatgttttttctttactcatggttacaaggccaattaaacggtgaaattcaaataatatataggtatcttgattcgaatgctacaatcgtctttgtgaacaagaaaaaatgttaatcagggccaactataggtaatcccttgctagcgggcaaagttattattttttcttgttggtccttatctattctttcaaattcaagtgtcatctcaataggtgcattatatcttgaactcagttcttctgcgagttgagctatagattgtttatctgcaaattctttagatccttgcaagaatccccttgtttgtctatatgctactttacccccaaactttgaattgagaaaatttgcaatatctttaaccttttcaatcggtatctcgttgtagtagaaacatattccattaacgggttccttatcaaatggtgtcccgtatctataccaaaatacaccaaaatgctcatggtctccttgtaaacatttaatctcccaatgatttacgttgtcaataggataagttccatctcttaaatcatttaggctgagcctccagtatcttacacgcatatttatttagggataggattatgcattttatatttgtagatttattctgatgttctagaatcccttttggtttgcaaaggcatatggatgtcaatgtaataagctaggaaaaaaagatgtatggtaaattatcatgcgggagaattttacaaaccgttataaatccttgtaatttgtctaaatctatttggataatagattggacttgttaatggaaatggaacaacgctttgataacagagacgaggcatattttaagaatctagttgaccacaaggattatgtaataagaactagagccgtatgcatactagcagatatttctggagaaaaagccattgaacctattggacgagttctattaagtgattcagaccaacttgtaagacatgaagcggccttttctctaggccaattagggcacacaagtggaatagaagtactatcaaaagctgtgatagaggacccaagtttttttgttagacatgaagccgcagtagcattaggggttataggatccgagcaatcacgaaaaacacttgagcgagcactaaatgatgagagtgaggaggtaagagaatctgctatgatagcaatagcaaatctcgattatatcgcacatgtaaaaagaaaaaacaagtttactagtttgaccggtggataattttgatatttaccgattcaaattcaagaaaaaaagaagactatctatattccacagggaaatatgatgttatttcatatctgtagatgagctagtaactataaaaatcgacaaattaatattgattctcgaaaaaatagtactataaaatgtctgatctcaaacaagaggagggccttacactactccttgaggaaaaagtaaacgaatttaatgagtggcgtttagaaaatctcactctaaaattagactttacaggaactgatttttcaaataaagatatctctaacgcttatcttaatggtgttaattttactggatgtaattttacaaattcaatagtggtgggcactaatttcgtacagtctaatttgtccgaaactacttttgaaggttctgatatgtctgacgctttggttatgtacgctacagctaagggttctaatattgtcaaaagccaattaagcaatactaattttatgtggtctgatttacagaattcagattttagggaaagtaatatgtacaaaactatttttgttgaagcaaatctttcaaatgccaataccgaaggactagataagaataatgcttatttaaaatatgcaaaattaaagggaacttcttgggaatagtattctttttcaattacctgtagaccttaaagcaacatcattatataagaaaatcacttcgattaatttcaaactaaattacttcaaatttttctctatctaaaaaccaagtttagattaacttagatataacaaaaagtattgtcattttatgttttgtatctttttttggttttgttaacctaataaaatcagtgtagcattagtagtatcacttttatttgataattgatatttgttattgatagatattgaacagtcaatccaaaataaatactttaagggataaaatggttttaactgtagcagcaatcgcatatctattaatgattacaatgtatgtaaatacatggaacgcaaatgcaattaaattaaagaaggaaaataattatgatattggtcaaagtgcaaaatgtattattgtagcggtaggatggggtacaattttcgtatatatttccttatctactttgctatcttcattttatattgttgtcaatataaaacaatctaaaccatttaataccattttatataaaaaattaatatgtatgcataactttttagataagatggagggaataggtactgcagaaggattagaagagtccaccaaaacaatcctcaatgtcttaaataattctacaaacaatctgttaatttgtgcagaccagtactggccttccgtcgcgattggcatagaagtttttaataaagggatgtttgacttgaagaaaagaaatgtaaaatgcaggtttattaccgaggtaactaaagaaaatattggtttttgtaaagaattattgaagatagctgcagtacatcatttacctggattaaaaggaaattttgcggtaaatgaaaatgagtatatcgcatcagcgacaatgaaaaatttacaattattgtctcaagtggtatacagtaattcaacggcagtggtagaacaacataatttcttttttgagaacctgtgggataaatctatttctgcaatagagaaaattgacgaaattgagaagggcatcgttcccgaaattgtagatgtcattaaaaatccattcgaaataaagagcatctattttgatattttaaaatccagtgttactgaaataatgcttattcttacaacttccactgtttttctgagagaggaaaatgatggattaatgcaatctttgatagacgcttcaaatagaaatgtaaaaataagaataattactccatcatttagtaatgtagaaaatgagattgataatctaagtcaaacggacaaaattgaagttagacgtatcgaatcgccttttgatgcgccgataaatatactggtcgtagatggaaagtactcgctgatagtggaattaaagaatgacacaaagcagaaatttaccgacgcagttggctcggcaatatattctacaagtcaaccaaatgttatatcatttgttaccatttttgatacattgtggaaacaaaccgagctatatgaaaaactaaaagacgcagataatcttaaagaggaatacataaaaaaactgcgactggctgacaaagcaaaagacgagtttgttaatatagctgctcatgagctaagaactccaacacaaagcattttgacttttgcaaatttattaaaatatgatgttaataaaaatgaatccatagaagcgatttataggaacgctaaaagactcaacgttctgataaaaaatatcttagatgttactaaaatcgaaagcaacaaacttgtattacatcaagagaattttatcttaaacgatttattaactactatcataaaggattacacaagacagttaaaaaaacctacatttaaaagacatataaaattgcattatactctacagaatgaaatcttagggcctgatgctcttattcatgctgataaggagagaattattcaggttatttcaaatttgctcgataacgccataaaattcattgaaaaagatggattgatcaggataactcttaagatatcaaaaggagatggtccacatgcgtatggatacgcagaaataatcattaaagacactggaagtgggatctcggaagaaatctttcctcatctttttagtaaattttccactagatcgtttcaaggtactggattgggattgtacatttcaaagaatattattgagtctcatggtggaagtatgtgggctgaaaataataaagatgggaaaggtgcaactttctcttttaaaatcccactaattaaaaccgacctgattcaaaatagttctggagtgagtatatgagatggaaaccaaaaaaaataaaataaaaatacttatagtagatgacgaggatgacattaccttatcttttaaacgtatcctaaaaattcatggatttgaagtggatgcgtttaatgattctatgttagctttgtcaaatttcaaggtaaactactacgatattgcccttcttgatattaagatgccctatatagatggttttgatttgtacaagaaaataaaggaaatggacaataacattagagtgtgttttttgactgctagcgaggcatattatcaacaatttagagaaaaagactatcatgaattaagtagagatttatttatccaaaaaccgattgaaatcgaagaattattaaaaagaattgcaaatatgatgaaataattatgggtacaggattgtgtatcatcaacccaaagggtacttcttcataatctcacaacgtccacaaatccttaagatataatgtcatcgtaatcatttttgcgatctaacatctgatagctagtagcattagcattacagttttacgctctgttaacttaaggatgaatcttctcctcgttatggtaattgacaaacagattcaaccagttccgtacatgatttagtttgcaattcttcaacctacaaggaaagtagtcatcaaaactttcagttcgatctttgatatactgcattgtcctttcagttagacttttctcaaacgaagaatggatgcggtgttttagttttaggaacccacatgcttgtggataccatgtgccaccatctgtggaaactggatgttttccatgattctttattacatctgagatgaacctctcagcaacaaacatgtttctttccttggatttattagctaagaaagagtgcgagaatttgcctattttctggctctattgctacccataaccagatgaattcaaatccaactttaagcaatgtctcgtcgatgataaattctgaaatcctttttctctttgataatatctttttaggatgatacttttgaatccacttccagattgcaacatgacttctcttgaccttgcggaaacaaaacatggctttagcaacgtttcttgtcgacaaacctagaaagtacaaatacaatgcacgaccaatatatgatgaagatgttttatttcttgtactggacatactggaaatagaccatctttaagctatagatttatcgttgagttaacagagcccagttttacaatagcaatatttttaaaccttgttttaataagctaagtagttggtctattgaaccacagtgaccaaaatttcaagtatttcactaaaacgaaccttataaaatgatattggtatatatttgcaatattaaacaacagccataaatagtacctgatccatatcatccatataaacatgatagataacctaaacaatctatctaattacaataagtatgataactctgaaaatactttcaatagttccggtggtggtattccaagatcaaattcagattcgaatagtttgattaaagaaagtaatcaagagcaaattaattttatgaatttcacacaacaatattgtataggatttatcgatataattaattccactcaagaaactgcaaaaataaaagaccctaaaaagttaagaaaatattattcactttttttgaattccatgagtaccatactttatcaacatagtggaaaaattattaaaaatagtggggataatttgtttttttactttccaaaaacatcaaatcttgatgatcatcgggcatttcaagatgtttttgactgcagcacttcaatgattaagtcaaatggccctttgaatcaagagttagcacaggaagatctgccgcctatcaattatagaattagtatgaattacggattagtagaagttgccctggggtctaccaacaaggaagtggacttatttggctcggtagtaaatgaatgtgccaaaataaatagcttgtctaaatcaaatggattggtaataggaaagaacttgtattccttattaattaattcgacttttagtaaaggatttgaaatatctgagatcaaactatcattagatgggaacagcagaaatttcaattcgtattacacaataatagataatagaaaaatattatccccaaacaaactacaagaaggactaaattatccatccacttcaaatgaaatcaagcgactgggtcaaataaaaaacaaacagtacaatatcttactaatagatgatgacgtggatattctatacacatttaaatcactgttaaaaagggagggatataaagtacattcctattcaaatcctattgaagctctaaaaaacttgacaaaaaaaaattcacataattatgacttggtagttatggatataagaatgcgcgaggtgagcggaataaggctattctacagatttaaagcgatagatccatatttgaatattatttttgtaactgctctggatctggttggcgagttcgttgaagcattacctgaaatcaaaatgactgaaattgtgagaaaacctttaagcggcgaacaatttatctcaatcataaaaaggaagttatctgaagctaaaatagattgcaattgacagtattgaattcgttaatttttattgtagtagatattgaaaacaaattcggatgggatattgtagcaaacaaaccgatgagtttccacacctgcccaatattacttcatatttttatgattattactaaaagaggatgattttttttgaaaaatcttactcatattttttcagatgattcgattttatcgagtataattaaactaattgttgtgccttctctactgctgtctctgttcttggccgtctcattagatcctactttatggatttcttcagaaacacatcatttttacatcgaattgattgcagtaatactaggctcggctctatccttttattacattttgcgttatagggttctaagagatggatttagtctttttgttggtgtaggcttttttattagtgtttctatcgatttattccatgttatagtatcttttgcattaatagagaatataaattttataaaatatttcattcctcaaacctggtttgcaggacgattcttccttggtgcgatgctcttaattgctaccttaaaatactcttcactatctgaaaaagaagaaataggacaactaactgacatcagatcccaatcgtatacacaagaggaacatgaaaaaaagactaatattgcacaaaaagatggtataattttttatatatcaattttggggattatcgcaatagttacagctttaagctcactctttttggtttatcctgcatctgttttagatgattattccgtgcatcggccgtacgaaattccacctctaatattattttgtttggtattgttctttttttacaaaaaaaaactctatctaaaaaaagatgtcgtgtataaaggacttgccttgtatcttgtaatagatatatttacacagatcgtgatggccttttctgcaatgtcttttgatactgcacacaatatggcacatgttcttaaagacgtaggatattttgtaaatattattgcacttattttatcaagcatgcaatacagtatgtatctaaaaaaggccaattcattaatcaaagaaaatcttaaaaaattacaggaaaacgaaaaactcaaggatgattttattaatatagctgcccatgaattgcgtacaccaattcagcccattctgggactttctgatctgatcaatcataaccttcagaataacactagcgagatcgatacatccgaattgaaagaagatattaaagtgatatatagaaacgcaaagaaattgcaaaagctaaccgacgatattttggacgtctccagaatagatagtcatatattaagacttaatatttcgaggtttgattttgtagagcttgttgaaaataccatccaggactttaccacaaattcagaaaaaaaggaagaacatgtatccattgattttgatttccatgatggaactagattaaatgatgagtttgatcaatcaattttagtagaaggcgataaagctagaatatcacaggtgatactaaatttattaaataacgcaaaaaagttcactaaggatgggaaaataaatataacagtattaaggaaaaagaacgcagaacaggtaattgtaagtattgttgacaagggtaaaggaattaattctgaggtaatgaatcacctatttgaaaagtttattacaaagtcagatagtggaactggtttaggactatacatttcaaaaaacatagtagaagctcatggaggtaaaatctgggcatcaaacaaccagaacggaattggttgtacttttagctttagtattcctgttgaactaagatctatttcataatcagaccccgaaccaaacgcaggaacaaatcgaatctgaaccatatcaaagatcaaattttatttattgaaactattatttatgaaataggtactttatctttatctttatagagagtatcatcggtatcggcgttggtttaacaggtataaacttatgaatctcttaatttcttatagaacctaatctccattgagctagtagtaagggtgaacatcattcactattgatagtcttttaattttaaattatttgccatatcaccattatgaattgtaaaatcattatttccaatttcataatttgcgtctagatcttttggtttaactgaatattctaagggtctttaccgcagtaatcaatagggtattaattactcttctagagcctgaaggtcgtttataacaaaatataataataatatagatcgttactaatattgcttaccatcttacttcggaacaagttctaaataaaagacctgtattatgacttttgttcaagtcaatttgtcttctaactaatttcttattgtcttattgttgtatttattttgtctaataattgttgggaatctacaggttttctcaagatatctgaatcactaatttcaggaaataagcttaacaattcaccaacagcatctaatgccgacataaaaagtatctttacattgggattcattatcctaaatttagagtataatttaataccatttattcccggcatccgtatatccattataactaaatcgtacagatatggattcgttgtggaaaagtcatcaagtgctttgtatggatttgaaaaagatgttattgtaaagccttggcttttaattatcgctgaatatgtaaaaagaatgtctttgtcatcatctatcaacaaaatgttaaaagacgagttatttttattttgatgaatacgcttacgttcatcatgtaatgctaatattttactttctatttctttttgtttattaatatcttcaaatcgacgaacggaataagttgtatatacatttctattattctctgaatagtcgttaacactgtttttacgatctaattcctcaaatacatagtcatcgaaatatggcatttctttcatcacttgataaagatctctatgaattatcatttgattcgatgaagctaaatgatttattttagaacatacatttacaggtgttccaaaaatatcgccgttatgagaatttgctacgatagctagttctactttaccataacttgcactaatcctataatttataggtggtaatccatttaaattcaacagcagatctacttgatcctttgcatcaatcatagataatccacattcaattacatcttgaaaatccaaatagttgctctcattcattgtacttggaaaataatacaacaagttatcgccagcgtttttaattactttacccccatgacggcttataattgaggtcatggtattgagaaatacagaatagtattgtttgatctttttagattctaatatatcatatgtattgtttgtagaatcaattatatcaattatgcatacacaataattattggaaaaattaacaaaggttatttgattatcctgtagactgccctcttttagggaaagatgtatattattttcatcttttgttgtattatttttatttcccaaatcatccaccatcttcttattcattttctactcgtttaactggatcattaaattaatgcaactttttgtaaggtgtgatttttattgaatcctgcatgaaaatatccggctttcacgttcaattaattcacgtaatgatgaggtattaatatgtaaatatgtgatcttgttaaacaataccaaaatatcacaataattatatttaaaggttgtcagtaaatgtttttagttaacttccagtcacatttggcaaccacttgatctattttatggatgatatcatatcaaacagatcaatgttataatgaagagcactgctggtactcgacattttctaatctttaattgtgttctgcttaatgtgaagagtaggatcctctttcttctctctaaaccgttgggtaaatggataaatagatgagtatttattaacaaacttaaagaaatccaaatcaccgaagagcctcaactacctgttttaacaatggcgagctgattttcggtaaaacatcaggtcattgacatttgtttcattaggataagtggcaaaaaatggaatttcattagttgtaaagttcacaaatatatccgttctatatccatttctatatgtaaaaaaacaaaatgtatgttctttaactaaatggcatattaatgctgttgggtgtatttaatacacctttaacacctacttgggaaaattagaccatatttatcaattaaaacacattcattctcatgcaaatccattctttttttaattcaaggattgaatgcttgtttgggtgataaaaaacataattaggtagtcattttaaataagatagcaaaaagacaacaaaaaagacatctagatgcaatatggttaactcgacatttccatctttgttgaaactttgattaaatttcaataactttttcaatattgatgagatattttctactacttgagtggaattatgaattaattacaactttaaccattatatttttataactgaagggggaataaagttgtattaatctaacaatgtcaaacatccgtgctaacaatactataccatcaaggttatcctttttacactgccaaacaagaaatcagtatgttgtttggcctctacacatatatcataatgtgagcatctatgaattataataattctgatatcgattctacaattagctatattccctacaaaaatgctattgacaacaatatagatttatttccaaatacaacaataaatgaatacacagatatgaaatatgtttatgaacacttttttgaagtatatgatccgtttctattagatcatagctgtggagaaagcctgttagtaaagtgtgctaactgtagcgatattttctgtaatggttgtggaaagcggattaatcatagctatagggacagattagtaaaagttaattaaaattattacaaattttattacaaaacaggaaaaagtttacaaattgtgtcgtatcataatcttaatatatagaataattgaaactgtatagaaatgcaatcaattgtatattatttgattataattacaataatcttgactgccatacagggtaaccatggacttgtagttgctcaacaactagatgttgatgtgggaaacattagtgattcttcagacgataacttatcacaaacacaaactgaacctttatttaacgaaaatcaatctcaatcatttttcaatattgataatcaatccgtgatgttacctgaaccaataaaagataacatagaacagaatatagcagagtccacgggaaacgatgaatcagtaggaccccaaggaccagcaggtgaagtaggaccccaaggaccagcaggtgaagtaggaccccaaggaccagcaggtgaagtaggaccccaaggaccagcaggtaacaactctattatcttaaaggaaaacatgtatgttaaaaatggcgttcaacaatctacatccgaagaagattcttttgtaactgccactgcaacctgtaacgacaatgatattccgttaagtggtggatacaatatcgtaggagatgaagaaggaggcggtaacggagaaataaatgaaattggaagcatacccaacattcaaaataacagctggacgataaacgtggaaggagaagatattcaaataactccttatgtagtatgtctaaatactaacaactaattttttatttctttattataatcccgaaagtaaaaaaaagcattgtatgttattttacttgtaactataatccctaagataactatattgaaatttgttttaatctatacgattctgtctataactttattggagccttcactatggatttaatttgtgattgttagaaatttatatatagttgcttggtgatgtactgtttctaccatagaaggaagagaagaaagaaacccctcatccaaatcatgaatatcctgatgataaaagcaatagatgcttcattcaggtgaccaatatttcaaaagatatcagtaaagatattcttatagttaattgaaaagtgttagggataacgagacacctgttagatttttgaatgaagccccaagtcttataatgatacaaggaatattaattgatttctcgcaaaataaaccataattttttttatgactcaaatcaaataatactctgtatgattttacattcaattgcttttaccaaaccataattgtggtcagtatttcccaataattcgcaatatttacaaatcttgctaaaagtacacacaaggtataaatatttcaaaaatagaactagataatgaataatcaactctttgcagctgtttctatgctattaatattagtattgtcacctttaagtctgacatttgcatctacatcctccaattcagaaggaggcggtaatgatgactttcttaacataagagaagccacaattgatgctaattcagatgaaatgagtgcattccttgaaacccatggtcatattcccacgaatggtgatggtggtgcatttggatacggtgtgttaactacagaagggttagatgcagtagtagttagcacaacacatgcaggtgtccaagatagtgaagaacaaacagatgcaaatgatcccgtatggcataaccactttgtaacattaggagaaaattctgataactgtggaaatgaccttcaggtcgaatctataacattcgaatccccaggacaagtagacattgaaaataacaatgctgacttgacagaaattccaacatctttctcaggtacagatgcattaagtaaaaatgatttgaccattagacctggaaccgatgttgaggatgtagtatcctttagactctcaccacaatttaatgataatgatgaactaaaagctgtgtgtgtaactgatattaaatcagctgataacattgcatttgacaataacaatagtgatgatggtaacggtaatggtaacggtaatggtaacggtaatggtaacggtaatggtaacggtaatggtaacggtaatggtaacggtaatggtaacggtaatggtaacgatgaaagtgcaacaactcaaggaatagatcaatcgcaatcaacaacccaataattaataatcattatttatttattgttttgtcttaatgataaattagttaaataatgaatagtaatataccattttccaaacaactttttcaaatacgatacttctaattataaacaattattgacaataatagaaaaattttcatttcatgaacctctttttcttttcatttataacctatcctaagcctttctgtttttttactgatgaatcttattattaaaactaactccagctttccctggtttgtctccaattctacctacaattgctggattaaacttgtgcttggataactcatccataatggttgctgcaaagtcttttgatactattatcatatttgtatcaggagtagaggcgctaacatttgataataggtgctcctttaatacaaaattcttaatatcattatctacatatggaacattatcaattattatttgattgttaattaatttcgagagttccacaaatgaagtaataccgttttttgagattggatgtgttactaatatatttgattgtaaatcgaattgattttcaaaatcaggcagatactttgatactatttttccgatcgatacctttggctctgtgagacttttaagagccagatcctttaatcgatttactttctctctatctatgccatgtttattcattttttgaaatactgtgtcatctagattggtgattatgtacaagccaagacatgccaaaagtcccaaactgtcagttgctattatttgcatatcttgttctattaaatcatacctgtttggtaattctttgtgagtattccctactgctgtagtaccaaaaaaaagaccacccaacttcaacgaactatagtcttcaaatgtataattatattttgctgtaaaactatcaatatttcttctaatatggtctaataattcatcatttggtgcatcatatattggataaagtttaatatctttagaacaccccagtagatttaaaagactaatagattcagtaaaagatatttccatatgaattggggattctataggttgagtaatatctgttgcctgggtattagaattggtaacaattgtatatccagttttgtttcctctttgagttttaatatgatcaaacaaaataaactggaaatcctttttgctatttgtaggtatgatggacaccttatctacctctattttagtatcaaaagagctagatattttcttaatctcactaactaataggttgtcgtcattaactatgtttttatcatactttaatattgaaacggcttttttagttttcagatcctcgtgtctgaactcttcatctattttgtaaattcttctaattatttctacatcttttttttctggatattggaaatagctatagtggtttggtattattcttaaattatttctgtttttaaattcatctgcaataccatcaaacttttcatagtttaactcgctataacaatccggtaaccatctcagtggatcaaagcccaaattattatattctgcaaataactcccacttttctaaactcagaccttactttcaccacgagttctgtttactatggtaacctccctaataaactagatgtctttgtaatatcttcttattttgagatcagatcagatcacatcatgagctaagataatgttatatgagttatagctccaattaataatatgtccaacaccgatgataggaaaattgaatttatgaaactttattctgcaaatccatcaaagtatgaaacagaaactgcaaaagatatcttatctttgtcaatcaagaccttttctccaaaaatagcctttgcttcaagttttggagcagaagacgtggtaataattgatttgatgtataatattcatggtgacaatactcgagtttttactctagatacaggtagacttaatccagaaacttatgatgtaatggacaaaataagaaaaaagtactctatatctattgaaactatgtttccagactttatggaaatagagaaaatggtgacagaaaatggagtaaatctaatgtacaacagcgttcaagaacggaaattgtgttgtgaaatccgtaaagtccatcctttaaaaagaatattaaaggatctggatgcctggataaccgggttaagacgtgagcagacttttactaggtctaatgcaaaaaaagttgaaattgatgaatcaaataacaacatcgtcaaaatcaatcctatcgtagactggaccaatgacatggtttgggattatataaaaaaaaataacataccttataataaactacacgataagggatatccgagtataggctgtgctccttgcacccgtgcagtagcagcaggtgaagacctaagagctggcagatggtggtgggaaactgattttcataaagaatgtggactccattggaataaaagttaaaaaagtccagtttatgatataattagcccttatgagttaagatgaggtaagataagcaaagcaaagcaaagcaaagcatactagaaaaagaagaaagaaataacctcatatcatttcatagaaggatgcctagaccacatggtggtagtttaacaaataattttatagatctgtctagaattgacaaggatttatttacaatagatgtagataccggagtaaaaaaggaaatagaaaatatttcatttggagtatttagtccattaaaaggatttatgaatgaagaaaattttaccagcgtagtaaaaaaagggagactatttaacgatttaccttggaccattcctattattttagatgctaatgaagagttagcaaaaaaagtaaaggattcatcacaagttgctttacgtaacaacggtcaaatttttggagtaatgcaggtagaagacttgtataaatttgataaaactcaaagcgctaaatccgtctttcaaactgacgatccatcacatcctggatttaataaatttgttacaatgcaggatatacttattgcaggagaggttaaaatagtcaatactcccaacaaaaagtttttagacccacttcgcttaactccagcagaatctcgaaaagagattgaagatcaaggttggaaaagtacggttgcatttcaaacccgaaatgttccacatgtggctcacgaaatgttacaaaaagctgcgttaaacatttacgatggcttatttataaatcctttaataggtaaaaaaaaggtaggagattttaaagacgatgtaatattgaattcctatacggtcttgatagataattattatcccaaatctaggatcattttttccaccttacataccgaaatgaaatacgccggaccaagagaagccatccatcatgctattatgcgtcaaaattttggatgctctcatataataataggcagggatcatgccggtgtaggtaattattattccccatttgcagctcacgatatttttaaagattatccagaccttgaaatcgagcctatcttctttccagctttttatttctgtaaaaaatgtcaaagctatgttaacgaacgcacctgtccccatgatttgaactatagagaagaattaagtggaaccaaaatgcgaaaaatgttttcctcaggcgatttaccaccttctcatctaatgagacctgaaatttctaaagtaatattatcctatccaagaccatttgtagattgatttactatattttacaaatatataatcgcattatgaagaattaatatgataataaattataaattttcaacttataatttatcatattaccacatttttttaattcttggtttaggtttaactattgttatggtggtgagtatttttcccccgaattccgtcttctctcaattaactaataattctcaagaatttcaaacagccaaatccaatgtctcagaaagttttgttttgccttttaatgatactaataatgatagacgtaatccggttgaatatgtttttgatgaaccaaagataaataattggattatctcgatatataataatcttagctattacaataataatgattctaaaaccatcataaaaattaaggaggcacctcctagtgagaaatttatcgaattgatgttgtatggtgatcagtcaaagagattcatagtatctgtgaatacaaatgacactggatatatgcgaatgtatgaaaacaatcaaaatgggtggtctacggatggtccggtaaccgtatctcacgccaatgtccaaggattgtctgtcactaacggaaaaaggatagtagtagataaacttggattaaacggattcgacgtgggatctatagaagtttatggaaaagatgaaccctcaatgcctaattctacacttgggggctctatccaattcgaagttctcaatggcagtctaactgaatctgttctttactatatgccattagtaatgatagtaggtgtaggcggaaccgtgatattcttgttgttttggaagaagcggaattaaagttatcgaactagatgcccaaaatactggaaactttcttagaccttttttgcttttttgctttctttataatatttgcaaatgtgtcttaaattacagtaattacattttggttttagcggcaggcaaatattttggccgtacctcacaaatgcagaatttagtctaatccaatgttttttgtctaccaacgcagacaattctttttctgtttcttctggactttttgtatttactattcctaatctattgcaaattctatgcacatgggtatctacaggtatggccgatttctggaatgcatatacgagtacgcaatttgcagtttttcttcctactcctggtagttttaataggtcttcttcatcatccggtacttgcccatgaaattcactttctataatgtttgcgacttgttttatcctagctgccttgatattgtaaaaaccgacggatgatatctcctttttaatgtcgtccaaattcgctctagaaatctcttctactccttcatatttcttaaatagttttataagcgcctgggtggtattttcgtctcttgttctagatgaaagaatagtgccaatcaaaattttaaacggatctcctttttcatttttatgaagatcctccaaagcagttaatctcaaaaagttgttggtgtttaaagcaaattccatttcaccaagtatttttgagatatcatacattacaataaatttttttttgatttcttaatttattgtctcctcttaattcttgctcttcctgtcttcctgggtgcaatattacctactttggcaccaggcggggtgtttcttgctacagatgatggatgacctatgtgttgatgtcttcctccaccatgtgggtggtatactgctgcttgagcaattcctcttactactgggtataatcttcctctggattgcatgtattttgctttattaccggctttaaggaacggcttttccgattttccacctcctgcaacaactccaatcattgcacgacatttgggattcatatttaggatcattcctgatgggaatttcacctttacgctatcaacggaatgtgaaaatactattgctgatgttccggctgcctttatcaattttccaccgtcgccaatatttttttcaatattacaaacaagtgttccatctggtatggatcctaagtctagaatatttttagacaagggttttgctccatttcctatctcaattttgcttccgactgttgtaccttctggggccggaatatatgaataattattgtcatcaaatttaattttagcaactggtgcatctcttcctctttcatgtaccaaatccattacaataccatgatgaacttcattaatctcaaaattaggatatttagtgggagctatttttccaactataattgctctaaattgttttcctcctttccctcttcttcttactaatgtcctctttcccaattaaatctaatatatcgatctcaaaggcccgctattaaatttattcttgatagttctaggaattttgatagtataacataatttctattataatggaatcagacacattaatttgaaattttccaaattaaagaatatctgagaaatcatccaactcttgataataaagttataaagagttgtgtagttatataattatgagccaaaacaccatatcactaaaggtgctagaagcttatacccgagatgtaggccgtggtgttgctagaattgattatgaatctatggatgctttgagcgcatctacaggtgatgtcgtggaaattaaaggtaaacgtagaacagttgcaaaatgtttacctctttatccttcggacgaaggtaagggtatactccgagttgatggtctggttagaaataatgcaggtgtagctataggagacactataattgtcagaaagattaaagctgttcctgcagaaaaagttatagttgcaccattagaagctattcctccaattgatgaacgatatttagctgatgctcttgaaagtgtaccattaatcaaaggcgacaatgtgatggtgccatattttggtggtagacttacatttcaagtcataggtgtcaccccaggtcctggtgttgatgccgttttagttactcaaaaaactgtatttcatatcgctgaacggggagaaactctccgtggagtaccacaagttacatacgaagatattggtggcctaaaagaggaagcccaaaaagttcgtgaaatgattgaactgccattacgacatccagaaatatttgaaaaactgggtatagaggcaccaaagggagtgttgttgtatggacctccaggtaccggtaagaccttgttggcaaaagcagtggctaatgaaagtaatgcacacttcgtaagtatctctggtccagaaataatgagcaaattctatggtgaatctgaagcaagactgcgtgaaatatttaaagaaaccaaggaaaaggctccttctataatgtttatcgacgagatagactctataactccaaagcgagaagaagtaacaggagaagttgaacgtagagttgtatctcagttattatctttgatggatggattggaagcaagaggtaaagttatagttattgctgccacaaatagaccaaatgccatcgatccagctctaagaagacctggtcgatttgaccgagagattgaaatcaaagttcctgataagcgtggtagattggaaatcttacaaattcatacaagaaatatgcctttagaatcagatgtaaatcaagaaaaaatagcatctgtaagtcatggttttgttggtgcagatttggaatatctctgtaaggaggctgcaatgaaatgtcttagacgattgttacctgaacttaacttggaggatgagaaaataaatcctgaagtattgaataaattgattgttaccatgtctgactttgaaagcgctcttaaagaagtgatgccctctgccatgagggaagtttatctggaatctcctgatgttgaatggaatgatataggtggattagatgatgttaaacgagagctacaggaagcagtggaatggccattaaggtacccagatctttatacaaaactaggtcactctaatcccaaaggaattctgatgcatggtccatctggtaccggaaaaacgatgcttgccaaggcagttgccacagaatctgaggctaatttcattagcgtgaaaggaccggaattattgtcaaaatgggttggcgaatccgaaagaggagtcagagaaattttccgacgtgcaagacaagccgcaccatgtgttgttttctttgatgaaatagattctatcgcaccagtaagaggactgggaggtgatagcatggtaactgaaagggtcgtttcgcaactattaaccgaattggatggaattcaacaattaaccagtgtagttattattgccgcaactaaccgatcggatatgatcgatcctgcattgttaagaccgggtaggtttgataagatagtgtatgtgcctttacctgacaaggctacaagaaagaaaatattggaaattcattcatcagaaaaacctatttctgacatcgttgatttcgatagaatcgctgaaattacagatggatttagtggagctgatgtatctgctgttgcaaatacggcggtttcactcgtgttgcatgagtatcttcaaaaatatagtaatcctgaagacgctgcaaaacatgcatcggaggcacatgttacaatgaaacatttcgaagatgctgtaaagaagataaaaactcaaagagatagtaagtcgggtgagaaagttacagtaccttactataggtaatttttctattttctcccatattttgatttctttattagttgaaaaaagtcataatcttatattttttattaatattgcataaaaattattataaattatttaacataattattaaaatgaaaataatttttaggggcaatgtttttaagtataatttcttgaataactttcacaaaaagaatggttgaaaatgcactacagattattcaaaacaaagtaacgttatctaagattaatcgtttttttacagacgaagaaattagccagttggttgaaaaatatggtactccattatatctagtagacgaagaggctctgcatgataaagttttagaacttaacggagcttatgaaaaatttcatggtcatgtaaagattgcctattcaattaaagctaattttaatccatctattcttaaaacattcatgaaagacaatattacttttgatcttacttcgttgggtgaattgttttttataagagaattaaacattaatcctgaaaatattgtctacacaagtgtaacagaagaactggatgaatataagcaggtcctttcttatgggattacgagaattgtcgttagttcttactttggattagttaatttgtctcaagctgctaacattgttggcattattcctaaagtaatggtgcgtatgaatcctgaggtaggtgttaaagccgaggtccgtgcatcttacaaaaatggcaaatttggagttcctttaaacggtggaaaagttgattcagcttatttcattgttaaatccatttttgataatcctttattggagtttgagggttttcattttcatctggggtctcaaattaccgactttgtatgttatgttagtgctctagaccgactaaattcattattaaataaactaaaaaaagaaatccccaatttttcattaaaaacactggatattggtggcgggactccggtattttataacgagcccgttcctaccccaagtgaaatgtcgtctgtttatatagaaaaactgaataatctagtgtcctctcatggtaaatttacactaatgatagagagtggtagatacctagttgcagaatcgtctataatggtatcaaaaattgtcaacactaaagaatacaatgatcataaaatagttattttagatactggatatcatcttttgttagatgctgctttacttaaacaagaatatcctcaggaagtgatatcaaataacaccaacaccaacaccaataatcgtatttacttttccaattctaacaaacagtatactgggaagaatattcatcttgtgggaaggttgtgtgacactttagatgtttttcctacctcgaaactatccgacctgtcatatgcgaacgttggaaattatattttgttttataatgtaggagcttattctctagtgtttaatatgccctttcattgtcaaactaagcccccagttctgatgaaaacttgtgagggcgatataaaattaataagaaaaggcacctcttataaggatctttatgaagaagaaggcggcttaattccataacaattttgtatgattcaaatatcatatggtgttttgactttgataaattatactagggttcatatttttgtaagtggaaaggtacaaggggtatattatcgtcaaaacactgcacaaaaggcacaggagttaggtatcgttggttgggttagaaatttgtcagacggacgggtagagtctgtaatggagggtttggatgtcgatattgataaaatgcttagttggtgtaagtcgggacctaaggatgccgtagtgacagatattaaaattatgaatgaggaatataagaaggagtttttcacttttgatatcgtcaaaacactttagataggtgattaatgctcctctgacaagtaatacttttagttctaaattttagtatattgttattgttactgttgttgtattttccccatactgcattaacttaacattatggtcttactaatatattatttttctctaaatattttttaacctcttttaattttgccttgttaaaatggaacagagatgctgccaatgctgcatcgacatctgtttttttatacacttttagtatatcatcaaccgatccgcatcctccagaggctattacaggaatatttattttatcacaaatcgcattaattaattcaatatcgtatccattttctgtcccgtctgtatctatacttgtcaaaagtatttctcctgctcccatcttttcaacttttttagcccattggaccgcatcaattccagtagattttttcccaccaaaaatcttgatttcaaaccaatatttttttccatccttggaaaaaaaatattttccaccttgatcatagtttctttttacatccaaagcaactactatacactgctttccgaaaatacacatcaattcctggatcaattccgggtctactactgcagcggtatttattgaaaccctgtctgcaccacttaggagtagattacgtgcatcttccaatgtctttatgccgcccccaaccgtaaatggtatgtttattacactagctacattttttacaatatctttcattgttttgcgatgttcctcagccgcagtaatgtctaaaaatattaattcatcagcgccttcgtcgctatattgtttggctaatttgacagggtctcccgcatctttgagttccttaaagttaataccttttacaactctacccttatttacatccagacagggaatgattctttttgccactgccatattaaatcaattcttgaacatgttctattttcaatttctcgtcatacaatgctttccctaagattactgcataacaattaacgttccttaactttaatatatctattatattgctgactcctccgctagaaactatttttacatctttaaaggtgttatttattttgattagtgtttctatatcgggaccttccaaagtgccatctttgtcaatatttgtcagcaagaactcattaatacccagttcttggtaaaaccggatggcatcaaataattttatacctgaaaattccttccatccagagatcattacattttctttattatgatctactgaaattataatccgatttagtcttttctttgatatcttttgtatcatctctggctgtttgaaagcaaatgttcctatgacaacctttattggctttttgatgtctaagaatctatttatactgttaatagttcggataccgcctgcaacctgtactggaatgtttaccgaatcaattatttttaatattatttcgctattgttctttcctgtattcaaagctgcatttagatcaactatatgtaacatatccacccctttggattcccatttttttgctacttctaatggattgtcatcgtacacagttttattttctaatttaccattaaccaatcttactacttggccatctaatagatcaattgctgcgatgcttttcattttgatcgtttgcaaatatttacaaagtttttaatcattttttcgccaattgtacttgatttttctggatgaaattgtgtacaataaatactgttaatttctattgaggccgggatgtgtactccgtaattcgatcttgatgttattatgtcgctatttttaggtgtagtataataagaatgtacaaaatagacccaagatttatttggtattccttcaaataatttactcttcttatctgttatctccaaactattccatcctatatgagggatttttactaagtttttggggagggacaatacttctccttcaattatatcaagtcctgctaattgtccctcttcacttttctcaaataacatctccattcccaagcatattcccaagactggaatgttttttttcataaatcgggagaatcccgttttacatttgtttattgaaataattgctggatcaaaatttccaacaccgggtaatactattccatccacttctgatgattcttcaaaatcatttatgattgatacctgtgctccgtttctttgaaaggatgattgaagactaaaaatgtttccggctccataatcaaaaattgatattttcaccatatactacatcatccctttggtggtaggatctccatcgctatttggatcaatccctatggcattccttaatgcaactgcggtggcttttatggccgattcgattttatggtgatcatttgttccataatgtacgataacatgcatgcaacaattaatatttccaatgaatgattgaaaaaaatgaataatgtcttcttgcgaaatattctcaatcttttctctttctaatttcatatcgatgtgactatattgtctctttatcagatctacagcgacgcttgaaacggattcatccattggaactgtggcatttccaaaacgattaatgttctctctcttgccgagggccttatcaatggcttggcctaatacgatacctgtatcttctattaaatgatgcttgataccgtcctcactttttgctttcaaatcaatgtcaatcttactgtgttttgaaaaagatactacaatatgatttaaaaaatcgatccctgtattaacgtttgagtttccttttccgtctaaattgattttagtcactatatttacttccttcgtccttctttcaatttcacacgtacgttgatgatcctcaataatcactatgtgcttttaattttttgtattatttaatatatttggtaaatcgtttacatttttaatgattacatctgcattatttgattttagcagtcttttcttatcaattgatccttttttatttttgccatccccatccccatccccatagactccacaaaaaaatattctatcctctgttgtttgcttcctaaaattttctaccatcaaaagatctgcaatggagtctcctacatacaatgcactagtcaattttaaattatcaaataccttgtgtagggaaaatgcgttaggtttggaaacttctctattttcatcctctaaaaacacacaagctttttcatcaaagtaatctatgagactgttaagagtgaaataagaagcaattttgctccgtccggatatcaatcccaaatttccattaaatttctttgaaagaagacgtattgtactctctttaattattagaatatccttgtttatgagtggctcgtcaaaataatatattggctccttattgaaccgctttttatataaaattggaccataaaagatttcattaaaaagtgtggaaatcgtatcgccatcacttggatatcttaattcttttgttatggatgttatatttccgatcttctcgagctctttttctaccgaatctttacctctgtcatctaatttctccaatatactacgaaaaacttggatggtcttgtctgtattcattttattaattaagatacaatataaaattattaggactattgaataagcggtatcgatatcattattaaatccgcccgtatttcgaagtttagaaatcatgtcctgaaaaggaaagttatctaaatttatgttaaaactcttaattagaataaactgggctgtttttattattgcttcatcatatgatttctttacgtcaactaatacaccatctatatcaaagataatcgcttcacattctgaaaaattgattttcttattagtcaactttatagctatagttaatcaataatcaataattaatatcctgttataatcttgtgtatttataattaaatcgactatagtatattaatatagaataatcaacaatataagttatataatacattcttctatattattgtgtgaaatatcggaataggaccgaaataatttctaatatcctaaatgccgctaatgggggcatttcaaaaactaaaataatgtacaaggcctttctatcatatgctcagataaaggaatatttgcctatactattagagaataacttgttggctcttggcaccgacggtaaatacaggaccactgaaaagggtattaggttcctaaagatgaatgaggagattcaagaattaatcgagtcaaaatcacttcaggatgattttacctaaatatcatattcctatttgaataatttactaaaatatagtttgatcttaattaattggggctttagcttatcaaataatcctatttttagcttgaatataaaaaacaatatattgtaatggtaagaaatatagatggatttaggaaatgctagtttttaaaatttttcatctaggaatcttatttactgtttttatctttactattcatattaattctgtttatgctacagttgatgccaaaaacaacaatagttcttcaaccggtaataacaccttatctgtaaagcctgataattacgctattaaggtgggcgaaggaaataatactgtatcctttacaaagtattttcctaattatgtagaaataactgccggggacagtataacgtggtataacggagttgatgttccaaatcctcatactgttacctttataagggatttagataatgccgaaaagatcggagttcccttctacgtttctaataacacacaatttgtccctgtattaaataatctgggagagccattagaagaaacgactggtaatggaacacggattgttatggtgttaaatgcacgagcattaactcctaccgtaattacagcagatgataatgtaacggaactaaaaagagactctatatatgcttttaatggaactgaaaaattcgttaactctgggccattgctagctttggataagaaacagaactttgattactcttttagcagctccttcactgttgtttttaataaacccggattttatgaatatacttgtctatttcatccttggatgattggaaagttattagtgaaaccctaagtagctatactatatactgtatactactttcttaaaatttacctttcatgatctaactatatattttcaaacctttttcatacttctatatttgacacgaaatattgatctcgattctcacgagagctctgataaaagctatagtagaaattctcaaaaatttttaaacaaatttaaagttagcgtaggtgatgaagtgaaaatagttactaaaaaagcagaattttttggcattattctgccccgatatgaaacttttagtgacaaatatatcgtactaaaattgaaaagcggttacaatattggaattgaaatagaaaatattatagaaattatcaataaaactaaaaatattgatcaattatccaaaaaacctgtaacaaaatccgatccaagtgataatgcccgtgctaacgatgataataatagccacaatttgttcgataaaatgaatagttctaaattattaccaaaaatattgctaattagcacaggtggcactattgcaagtaaaattgattatagaacaggtggtgtaacttcacttttgactgcatcagaattatattctgcttttccagaactttctgactatggatacatttatcctgaattcttattcaacgaatatagtgaaaacatgaatcctcatcattggtctgccctagcggatagaatttcatttgctatcaacaacgaacactatgatggaattattgtatcccacggtacggataccatgcattatacttcctctgcattaagtttcgcgctccaaaatatcccaattcctgtacttttggttggttctcagagatcatccgatagaccttcttcagacgcattcagcaatttagttggtgcaataagatttatcaaggatgcaagatattcaggcatttttgtttgtatgcaccataatacttcagatgaagtaattgcatgtcatcttgggacacgagtgagaaaaaaccataccagcaaacgtgatgcatttaaatcgctcaatggggtgccttttgccttaattgagaattcagacataaaatacaacaagttattacacaacggaagaatagaacgtgcgaatatttcaaaaaattttacttcaaggacggcttttagcgataaagtgtttctattgaaattctatcctggatttagttcatcatttcttgagaacttttttcagatggattataaagtcattatattggagggcactgggcttggacatgtgagtaaagactgctttcctattttaaaaaaactaatagattcaggcatttttgtttttatgacttcacaatgtatatttggtacggtacagatgaccgtctatgataccggcagagaccttttgggtttgggtattatctctctttcaaatatgagttcagaaaccgccgtcgttaaagcaatgtgggcattaggtaataatacgggtgccgaggattttgttaggatcatgaaaactgattattctaatgaaatttctaatatgttgccactagtttaataggtttaaagaggacgagtttgatgaatccagatatcgacaaattaaacgtaaaggttggctttgaaatacatcaacaactaagtacatcgtctaaactcttctgtaattgcaaaggcgatggatccaacgacgagggttatgatttcaactttattcgagttttgagacctacaaaaagtgagttgggtgattttgacaaagctgcattatttgaacacgccaaaatgaattcaatcaagtattattctaaagtaggatatagctgtttagtagaagctgacgaggagcccccacatgaagtaagcaaagatgcacttgaaacagcattgttgttttcactcgctctaaattcaaatattgttgatgaaattcatgtcatgaggaaattagtgatagatggctctaatgtcagtggatttcaaagaactatgttgatatcaacaggaggttacttagaagtcgataatttcaacaagataggtgtccagggtatatgtttagaagaggatgcagcaaaattaatttctaccaatcctctattaaaggaatacggactcgacaggcttgggatcccgctagtcgaaatcgcacttgaccccatatctggtactcctgcagaaattgtaaacgtcgcattaactctaggtagattacttcgaagtagtaaaagagtgactcgaggaattgggagcataaggcaggatgtgaatatatctgtcaatgatggtcaagtagtcgaagtcaagggagtacagcaattatcacaacttatcaaagttttagactacgaaacaaaaagacagtacggattaatcaaaattgcggaagaatttagaaatagaaatattaatgattcctttattggcgataaaattgaagacataacttccttgttctcaaattcatcatctaaggtgataaaaaaaatattaaaagacccagacccagtcattaattgtatccgtttgaggggtctacgtggtttgattggctatgaacctatgaaagatgtacgactaggtaaagagttaggagagtttgttagattttttggattgggtggcgtctttcattccgatgaattacctaattatgggatcactatcaatgagatagatagcgttaagaaatctgttgatgtttctactgacgatgcctttataataataggcggtaacagggaaaaaataagcaaccttcttgaaccattgattaaaagggtaatccaatttaaatatggtgtcattgctgaaacccgttcagttactttagacggaactaccattttttcacgacctagaccaggttcatccagaatgtatcctgaaacggatataatgccaattcctgttgatcgtaacttacttgatagtttgaaaaataaaatacctttgccatggaatgaattaatcaaaggaatcatgaaaaagtatggattgaatatgaaattatctgaacaaatttttgattctgattattataatttatttgaaagactcttgataaccaatcccactatttcacccacctttgttgcatcaaaacttactgaagatatcgttagtctctccagaaataatcttgataaggacctcttgacagatgaaatgattctagacattttcaataggcttgataagggatttattgcaaaagagtctataatattaatttttgaaaaattaatgaaaaaggattgcatgacggtagaggaagcaataaattccctcaacctaactaaattagatgatacggacttattttctacattggataaattgtttgatgataatttgagcgttataagagagaaagggcccaattccatgggtgtattgatggggaaaagtatggcagttctgagaggtaaggtagatggtagcaaaattaacgactatttgaaacacaaattagaaacatttcttaacgaaggatcttctccttccccttcttagcatgactcgagtacctaaatcaatcaagaatcactatatcgattcttttctaataaattcagagaacttgaagtcattcctctcatctcacgagatttcaaactctgaactggagtatgtgtcatttacaatttccaaactatataatcaaaaggtggatactattttagaatcgtgcggaaatgattggactaggctagattctgcttcttctcctttaattttattcgttcaatgcattgatgaatcactccgtgatcacttgaatatttcatcacgatgtaggtttattctaaattcattctcaaaaacgttagagtcttggatgatctggtagtttatactttgatatgttgatttactgtatctacttttgtatttctaactttgaataatcttgttttagtaattattgttgattctaaaaaaaaatatttagtgtgcgtgaggtggtggtgcactaccttttgataattcttcgttaaatgttcctgatgctttttcgtggaattccaatgcggcctgatctaccttaattgcttgaggtggacataccgacacacatgccatacaccaaatacaatcatgttctctgattggatctgctttatctgtatagtcttttctttcttctttaactgaagaaccagtgccttcaaacacttcatttactgcctctttagctgatacgtcatgttcagttctgtaccattgaaaaacttgtacaggacatgcttcaatacatgctccatctgctacacacgaatcccagtcgactgctaccatagttccacttacacctaaaggtcctatttcttctccttttgcttggaatgcttctttaacttctgtattttctgctgcctcttttagtgaacctggaccccataaatagtgaaaatgttcatcgtctgatgtttttatctttccaattacttcatgatttgctggaaaatctggatcgattggcatatttttttgcagagatatttgatccttctatattatataaatcatgtgtagaaatatctataggaaggctagatatttcgagtaattttgcacaattcctctgatttgggttgatttattctttcctattcaccaattgaatatactgatatgcagaggtttcattgtcaaaagcataatgtaccttttgaaagttctttttgaactctgttacattttgcaaaactttaggaatatcttgcttgtctattacaacttttttaataaaggttgctatttcctgcatttcgtcttccttcattcctagtctggttacttcgggaactcctattctaacgccactgggatgaaaataatttcttccctcttttatgtccccaggtagcaattgtctatttaggattatattacatttttcaaggtccttttctatagttccaccatcaccataatttgagacgtcgacggcaagttgatgtgattcagtatagcctctcttttcccctaaaacattgaatccatgatttgcaagggagtaggcaagcatttttgcattcttgatgacctgtttggcatattcttctccaaattctaatgattcagccaatgctactgctttgccagcaacatgatgtaggtgatgactacttgtatttcccggaaaaattgccttctttatagactccgaatatttttcaaccgatactatgatgcctccttggggtccccatagtgtcttatgcgagctcatggtcatcgaatcagcgccttctcgtaaagggtcttgaaattgtccaccagcgattagacctgctacgtgggctccatcgtaatttatatacacatttcgttcatgcaagaattctgataattctttcacaggatgagggaacaaaaaaagactgccgccaaacatcgctattttcggtgcttttccttcggcaatcattgtatctatttttttcttggtcagttcaacatcgatggtcatgttttcttttgaaaatggaaagtgttctattactaatccgtgaaccaagccggccgttcctgagtgctccttttttccgtgtgaaatatgtccaccggtaggaatcgacgaagctatcatagtgtctccaggatttgagaatgcagaatatattgccaaatttgcgacaactcccgaagttgctctacaatctgcaaattcagcattaaatactgatcttgctaaatcattgcaaatattttcaactttgtctataaaagtgcaccctgcgtataccctttctccaggccaaccctctgcatacctatttccaaaatcagacgccactgcttccctgacggctggactggggatattttcacttgctatgaggggaattgagtcattgaaccagtcatgatgttctttaattaattttagaatgttatcctgaatttcttttgcattcaatattattttttgcaataattacttatataaaatatcgtaatctagcaaaatagtgatattttagtgatgattttttagtcatttataacaataattttatactacatgtattttatctactcatgcagaaggttaaacagatggaaggatattgtgttaaatgcaaagcaaaaagagaaatgaaagatgaaaaagaggtaaccatgaaaaatggaagacctgctactcaaggtatatgtactgtgtgtaatacgaaaatgttcaagataggaggaagtaaaaaatctacataaatactaaaaattgcaacaatctagtcgatttatatcgatattttctatatttacctttttgatatcatttgctatcaataaattgattgattgattttaacttcagtgtttgagaatgccttttcaacttgttctaagttggaaataaatgcaattgaaaacaaaattctttggcacactatatatttattctttaatgttcttcaaaaaactatttaatatttttatatgtgtcattattttatgttattacagtaatgatgacaaccttctagctctgaactgttgtattttaattaatggctattatatataggaatttatggatggattagacagggaatttgaaagacccgattgggacgtttactttatgatacaagcttttttggcaaagctacgatccaactgtcttactaggcaaataggagctgtaatagttaagaataatagacaaatatcaactggttacaatggtaccccatctggattccaaaattgctttgagggtgggtgtaaaagatgtacagataggattaaaggtattgttaaatcaggtgaatctttagataggtgtatttgtgtgcatgcggaggccaatgcaataatgcaatgcgttatgtttggaaatgctggcagtaccaaaaatgctactttatactctactcttgctccatgcatagaatgtagcaagatggctattacagtagggatcaataaagtggtcattttatctaaatatgacgaggacggaaccgagatcttaagacatggaaatgtacaaatattagaaatgaatccagctaaattgcaactttggatctcaaagctatttggatgatactgcttaagaatacaatttctgtctaatcaaacctgtctaatctaatgtatctaaataattaagtaaaattaactaactaaaacaaaaacaaagcaaaactagaacaaaaacaaaaaaaaagattatggaactgatctgctgtagagttttccttctaatgctagtttgtacatttctgctacataggggttccttgcaggagtttcagcgccaagttctaccaaacgtgcgtataccctaactacataggccaaagcacccatgaaagctactactacacccatgttaaacatccagtggttaggtactgaaaatatttcttcaacaaaccaaaagtgccacatttcattgataccaattgtgaacatggtagctaaataaccgataatggttatctttagacccgtattcattgaattgtttggtcctcttaatgctggtactctcctgtcatacatcgcaacaaatccccaacctagtgggagtgcaataaagtgactgtataaccaccaatgagctggtgtaaatgcactgtctctgatggctgtttggtgcaatgatccatcaacaaagttgtctacttctactgatgcagcaatagaccctagcataatgaccattatatagatcttttttagcctctggatttctacttcctttggaattaatgcaggcatttgtgccattttactatcaccatatcttcgttgattaaatatataagatgtgaactaaaatatttataaataatactagaaattgatggaatattattaaattattagatgaatgtttaattaattaactaaatttctgatgttttgtcaatgttgtcaagcttatcgtcgatgattatcatctctgataaaataatctaaactataaataattaatggctttaaaaatacttggtgagaccattagtcttctttgaccttgggcaaacgctcattgatgaatggaattacgttacttattttgataaactattattccagacacttaatgactatggggctaggatagatcaaagaaactattatacgttgagaaatgatttagttcgaaacagaaaatttggttcatcaggatttctggaaattatttccctaatggtacgtcttatccttcctaagggatatgattctgtgattttcgatgttttagagacggatttgctagaaaataaaagaaaactaatcaaactatttagtcaagttaactacctcatcccattattatccaagaaatattcattaggtataatcagcaacaattcatccggttcagccaatctattggttctaaacgatctagataagcattttagaatagtatgtttagcagaagatattggatctaaaaaaccaaatcatgaaatatttcataaggcgttaattggctgtaattcaagtattgacaattgcatcatggttggagatagattagatatcgacattttacctgccaatgagctcggaatgaagaccataagaactttggactctttatacaaaattcaagagcctatgaacaaaaaagagacaccacttttcactatacacactctctctgaattacctgaagtattgtctcgtatttcttagattctttgtatctccttggatatttttctccattgttcatctaaatcacttccttgagtatctcgtttattaaaaagagaatgaattgaaatcttttcacttgattctgcaattggaataatatgaatatgaaaatggggaatttcttgtccagcatcccttccattatgtatacctactagtgaagaattacagttcattgatttttctattttttcagtcaataggtgcaatgcatcaaaaatgtctctgttttctataaagctcaaatcttgaattttgggtttatgtgatttggcaattataagtgaatgtccatccttgaggggaaatgcatctaaaattgctattgaatgttcggtttcatgtatctttctagctttaatatttccattaattatttcgcaaaacacgcatttgttcatcgaattcataatcatatttcgtgcaactgttcaataaatgattattatcactatatttaatcaagattaataaaattggatgaaaaaagtatcctatgggaaaaactatagttcatgaaagacctttgactacaattttgatgaatgaaaatgttgcaaaagtactaagcgatccccacagactaaaaattttagattttctttatcataggaacctctcgactaaggatttatttaatttattaaaaagagcaaaatttaacattgccatgactactttgagacaccacataaccatactgaaaaaaaacggtttgataggtgtttataaaacagaagaggttaaagggaccttagtaaaatattataaagctaatgtaaagatgctggcttatgaaaactatccatttgtttcgatcgtgagagataacagggaaattattgatatgctatatccaaaattctataaagccatcaagaagatcatgataactgaaaaaaatttaatggcaattatttcatccgaatcaaaatctaaatgccgaatttgtaaaacttctcattatgccgaatttttgattttcatgattctgaatatgataataacgaaagttttacgaaagttattgaaaactaggaccaatgttgagatgtaattgattttctttcacaataatataatatgcttatgatattcccatcatcatcaattcatcatgatatattttcttacattcttgatcgaggtaaaaaagtaaaatgcaatttacaggtacaaaaaaagtctatagttgacatggtttacaatgtctatgtacctacaataaggttggatattgcttaattgttaggaatgtctataagaatacaaattaatatctgactctaatcgttaaccatttttgactattaatcataagaaaatgagttcaatctgggacatcaaatcagtgtcctgaacactaatagatatattttaaaataccaataagctcatattttatttatgtcgcctttgcttcaggtcaggaatgtaaacaaaacctttccaattcataggaatattttccatcttttatcttcatcaaatccagccagaaaggcaatcgataatgtgtcctttgatttgggacagggtgaagtattggttatagccggcgaatctggttctggaaaaactacgctcgctaaactcataatgggtgctataatccccgacgatggtactatatcctttgaggggaatgacgttcactctctaaaaaaaaggaaagcattttattcaatgatccagatgatccatcaggatccctatagttccttaaatccccacatcaaaataaaagacatagtcatggagccactaaaaattcatgagaataaattaagtcgtaacgaaaaagatgagaaagtgcgtcttgcactacgtagaacaagacttgaacccgttgaagagattttggagaaatatccaaccatgctttcaggtggtcaaagacaacgtgtttcaattgcgagatcaattgtaaaaatcccaaaattaataatagctgatgaacctgtttcgatgttagacatttctgttagagctgaaatcttgtcgttattaaatgagttgagaaagactctgaatatttctattatttatatcacacatgatttagcaacctcgcgattcattggtgataagattgggattatgtttgctggaagcatcgtcgaatatggagaaattgatgaagtgttacataatccacttcatccgtatacttggatgttactagatgcagttactttttcaaccgatgaatctaaattctataagagcttcggtggcataaatttatctgaattgccattaaagggatgtaaattttataataggtgtaaattatcttttactgattgtactaatgatatagaacaatttgatattagcaagagacattctgtttcttgtttctattatagaaacctaaacccaaatcaaaatcaaaatattaattaggattcaacttatatatcgtttaattatgtgtcactctacttctactttgactttgcttggatgattgtactttaccacttgagatagtccattcttcggataaaccccaaatattaaatctgattttgctactgtggaatctttgagtgttaccattataatttgattattgacagatctaagtagtagtatttttgatagcctttcagtgttttgagcatcaagatgggcatctacctcatccattaaatagaatggagatggttttagcgattgtaatgccagaaggaatactattgcagccattgttttttcgcctccagacaaggatgtagattccctggcaggtttattgggaaattgcaccattaataaaatcccgccagaaaaaatgttatcgggatcctcaagttccaaataagcattacctccggtaatatcggaaaatgtttttctaatgtcatcatcaactttcttgaaagcatccgtaaatagattttctttttctttacctatttcttctatgaaattcacaattgaatttctctcttcttcaagatggtttcttttatcagataaacctctgtatccctctattatctctaaataagtttcatctgctctaaaatttactttatctcttatattttcatactcttctttcagttcgcgatataagtcgtctacatcaaaactttccaacaaggatttgtgacctaatctagcaagatcgttagtttgattcattttttgatattccagatctagaatatcttttcttaaaaatccaatatctttttctaattgatttgattctttaccgagttttttttctagttcggttaatttcttgatctctgtttcatactcttgtaatcttgagtaagtggtgcttgttgcttgaattatttcatcttccttttccctcagagttcttaattctgattctatatcctttccatctgatgtggctttttctagaatcttattcctctcaaccttttctatcctgatttgatcatcttcttgtatggatttattatgtgcccgagtaatattttctatattattctttaccatcgaatgtgttaatttcatttgatttaatctggtgtttatgatatctagttcatcaacaattttgcgtccgtcttcttcaattttcattatcttttgcatgtcaattctttcatccgtattttttatttcaatattcattctactattagtattagtaataattttgaacctccttttagagtagctaaaattgcgaaaaagatcatccacatgtgtgctatgttccttgtttatagtatatagtatattcaaatttttaagatttgttactaaaagattttctaactcattgatgttttttgtgatattggacttttctaaagtaaatgtatccagtttccctcccaagaatgttctctccttatttagcaaatcaatctccgtaattcttattcttgttaattcttgtaatttttctatattttttcttaaattttcaatagagtcagaaagtaacaaatccttcgtaacatctgcaatttttgatccgtaatcgaattgcattaacgacaagttaggaaaaaaaatttctccactcgttgatacggctttgaaaccattattggataataaatatgctgtcaacggattcttcgtaagaatcgtgtttccaaataaaaattcgggtaagtgttttactttgcttgagacaaaatctgagagaactcccaaaatcgatggattgtcttcaatatcttttatcttctctccactaagtagttcgagtggaattatctttagaaaatgtattcctttattttttgagaattctgcaagtgtaatcatacttttgatgtcttttacaattacagctttcatccattcgtttccggatgcaactacagctttttgatatttctcgttccatgttattaaattaaatacatatcctattacatctaaattcttaaaatcttttaatagggttgcaatcgcataatcctcagttaaactattctttgctaggtttattttctcttcgtatttaatgatcactttttctgcattttctattactctttttgagatattggtttcggcggtagctttgaataatttattatcaattgtttctttctcgtcttccagcttacctattcctgtatcaagctctttaatttttgattttgaactgagaatagcactttcaatttcctgattctttgcaaggaccttgtggatttgtgagtcattttcctttatcttttcggaatagtttttaatgttttcttcaaatctggctatggttatttcaatttttccttttatggggattaatttatttattctatctgtcaagaaattcttgtatgttatttcacccgagtttatcttattaatttcatctatttctttggttttctcagattttttctttctcaactcatttaggttttcttcatctatcttgatcttggattcaatatctattaattgattgtttaattcgatctcttttccactaaaggttttttgctctatctcattggttttcgccttttgatttaattggtcaaaataatgttctgcttcttttatcgtagctctatttctttcgtactcataggctactgttgatagtcttttctcattttttgttctttcactgcttgcagaattggcctgaaccaaaaataactttttctcttgactaatgttttcgatttgagtggttacttctcctagtttttttgaaacctcttggcttttaatttccttagttttttgctcttcattgagttctgatatttttccagttagattatttatgcttccggacagttttatcgcttttagccggttaatctctgattctatttgtaaatatctatgttgatcgtttctctcttcttctaactcatcaatcctattccttacttcgtccattttagccaatgctatttcaagccttctgtctgattcctcgagttgtttataggcctgatctttcttttcatcaaaatatgagagtccaactatatcttcgattattttcctcctttcttccgaattcagttccgatattctagtaatcatcccttgttggactatattcagtttattaggagaggcgaccactatctctagtaattccaagatattatttctcgatactctctttttattcaaatagtattgactttctccagtgttgactccggacatttctctcgttatggtaacaagattggcatccactggaattcctctatcttcattgtcaaaagttacactgaccttaactattttattagaatcatttgaactactatcatgaaaaagtgattgaaatttgtctacacgaagggcttttggactgttctcccctaaagcgaatattattgcatcaagaatattgcttttgcccgacccatttggtccagttacagctattagacctttttgaaagtttagtgaaatgttctttgatccaaacgatttaaacccaaaaacatctaattttttaatatagaccaaaattatattatatttggatgttttctttctttattatttcttttttttatggggtcatttttgtatattattgtcattattttgttgcttttgtatagttattattttgacatttttagcatcattggtgtgtccagatttatctagattcagtgctcttaatgcaaccttatcggacatgttatttgttttaaagtcatgttcaggtattaatgacaatatttttctaaaatcctgttcgttctccacaataatttgaatagttccatcttggcttaatttagacttgtaagaatgaagtagattttttaatatcctttctttattgactcttttttcagaattatcacaaaagattgttatcatgaaattatcaacggatttatcttttatgaaagggagaatgttgtctgggttgcctggaagaatctctaaattctctatttgaagtcctgataattttgtttgtgcctttattatttcgtctttatcttttacaattcctatatgatattcgttcttattatgaagagcagtgttaattaaataatcgcaattactgaccgacacatccatgttaattttttcatattttgttttagcatccaagattagattgtttattttgtttgatggatttccctcatgaaaaaattgatatacattatcccatttttgtctgaaaacatctggaaagttttttcttgatattatgtccttaaataatgaaccttctgaaaataaagacaagaatctatcagttctagaaacagcttctaccaatggaaaatctagttcttcatacaattttactactctgttccatgctaagagaggatcagaactaagatacgttactgacagatcagctaatgatagaatttctgcgattagattgattttctctacggaaaagtcttgaccatctatttcttttagtaaccgattaaagttgttatacgcattttcattaaaaggatagtctgttctccatattaaagcttcaactattttgccttcgattttagcttctctaccatttaacatttctggatgagtggtagcaaactcctgtgccactaccaaaggagaagactcatattttctaaaaaatctaactagttcttcactatttagcaaaaaatatgcatcatgaattcttttattttttatttccgctatagtgtttgctactgtgggaactcttgtatactttaaatcataatgcgaggtgccttggtccggatcgtaatcatgtaacaatgctgcaactagcattatttcatagtctctattggtaatcgtgtaaccatgaatttcctttggtaacatgcttaggctcatatatgcgacttctagggagtgatgtagattgtgatattcactcgatccttctcctaagcctagcttatcatattcttttttaagatattgggtcaataaattcaatttagtcaatgattcctgattgatgcctgtgggtctggcctttaacaaaatagattcaattagataatctagagataaactcgaaagattttcattcgtgtattgtatttgacgcttttttgcacccggaagtatttctttaattctattatacactatctttatggggagactcttgtataggtacgtggagaaggatgtcaaaatatttccagaatctttcagaaaaggttcttctttgaaaattatttcatcaattattttgggtatgtttttattaacatctgaaagtatgtttgttactgtatttatttctgtttgagagaaaatgttaaatcttttatattctgtgttaattactagccattgcggaatcataaccttaaatattgcattcttaccatcagttaatttatttttcttactcggagaatcagcctgatcgaatttttttaatataactactatgttaccctttcctcttttaaaagggagatttgcatcctttgtcacttccagccttacgttcttgtttattttccacagctccaataatatcttccagtattttcccttgtcaagccagtggggtacctcgttttccctatcccaaaaatctactaaactatgataggtatatccgtcttccaaatgatttgtttccgggttgaatgttttatcgtcatattctcctataaatgggtctagtttacgacataaatgccaggtattccttaccatttttgtagaaatatcaaactgtgaatgtgccattagaccccatataaaacccagcatactagttgtagtgaatagtacgttggtccaatctctattccaatcaaattccttttctgaaaaaaaatctgatactagcgggatggcgaaaatacctgttgtgatcatcgagacaaatgataatgaaatgaaaaagcaactcgcataatcataataggacaaattaaaagtccatttcttgatcgactcgcctacattcaaatcaattttccaccccaaatggaaattgggttctgtttaattttccatttattaatatttaacttgaattatccctctttctatcttatgaatgttatttttgtattacctcgtattgatactaaaaattattatatcaacatgtacatatagcagaataccataaaaagttaggaaactgctttgagaggttgaactagtattcgaaattggtagaaatactttgaaaaaacattgtagatgtggttaggaaatattcatttgtttggctttatttactatatttcttataatgttcttcgatgcagaaagttgactttggggattaaatatcacttctaattcctctttgcttacattattgataatttcttcttcttttattaaagcatcaaaaaagtgttcttgtttttcagctgcactaaaggctactgattgaatatctctatatgctttgaatcttgaaataccttttaataccaaaacttgtaggacaaattctgcaaatatttgacccttggtcaattctatgttatttactattttttccttgtttatttttaaacctgctatgatctttatcattgtgcttatcatatcatccaccaggatggatgacattggaataataaaacgttcgttagccgaatttgataaatctctttcatgccataatgctatattttctaaagaaacgttcagatttgatttgacgattctggccaaagacgagattctttcgctctttattggatttttttttactggtactgcgctacttcccatctgtcctttcttaaatggttcttgaacttctccgatctcagtacgctgcaagtttctaatttcgatagctattttgtctaatgttaatgctattagtgtaattgtgaataacatttctgaatatctctcccttggaatcacttgggttgcagcttcggtggggaagaggtctagtttctttgcaactattttttgaacctctaatgcattctctctcatcaaagatcctgttcccacaactcctagggttttgcaaagtagaaatctttttttcccttcgtcaatccttattaggtggtcaagtaattcatttgaccaaatagcaaatttaagtccaaaggatgtaatacttgcatgttggccatgagttctacctaccgcaggcaaatcttgataatctgttgatttttttagtaattctttgattagctggtgcaattttgattccagtatcttaaatacgtcccgcatctgcattgaggtactactatctaccacatcattacttgtcaagccataatgaatccaaggttttgaactttctgaacataactcgcttattgcttctactatcgcagcagtatcatgatcacttatactttctaattcttttactctttgtactgatattttattagaagaaacaacctcttctatatttttagaagcttccatcggaattatctgtaattccgcctgtgcatttgcaaccgcagattcaaaaattaattcataatttagttttctatcttcttcaaaaatgtctttcatttctttcgttccgtatcttccgctatcaataggtaaaataggcattagtctaaagtcagatattgattatctaatttattatttaggatgattaatatttgacaaaattaaaatatttatcataaagggaataatgtctggttcattagtaacaaaaaatggtaagcatttggttaataaaatttctgactatcaatttcagatatataaagaagattcgcgtgggatgaatgttcctgtaacaatatttgcgaatgatctattgatatctaaaatggcccttgatcgaacactcgatcaagctgtcaatgtcacgaccctgcctggggtaaaaaaacatgtagttgtacttcctgatggtcatgaaggatatggatttcctgtgggtggcgtggctgcatcagattttgaagagggtatcattagtcctggtggagtaggttatgatattaattgtggagtcagactgattagaactaatcttgtagaatctgatgttcattctaaactcaaaattctagttgattctctattttcctctattcccacaggtgttggaagtgagggggctattaagctgaccagctcagagctggacgatctactcattgacggcgcaaaatggtctgtagagaatggttatggaatagataccgatcttgaatcttgtgaagagagtggaagaatgaaaggggcagatcctataaatatttcaactaacgctagaaaacgcggttcaatgcaactcgggagtttgggttctggaaatcattttctagagatccaaaaggtggacaagatatatgatgaagaagcggccaataccatgggaattagaaaagaaggagaaatacaaattttaatacattgtggttctcgtggatttgggcatcaagtttgttctgactacttacggttgtcagaacaagctatgaaaagatataatctaaatgttgtagatagagaattggcctgtgttcctaatacctcagtggaaggagagagttatagaaagtccatgttttctgcgctaaattttgcttgggcaaacagacaaatgctcactcactggacgagaaagacatttcaacgagttcttcaattaagcgaacaagatctcggcatggaattagtatacgatgtatctcataatattgcaaaggtagaacgtcatagagttgatggggaaggaactcgtgatttagtagtacatagaaaaggcgcaacacgtgcatttccttcgggaatggaacaactacccgataaatttcgttctgtaggacaacctgtaattattccagggtccatgggtaccgcaagttgggttcttttgggttcacctaaatcaatggatcttagctttggatcaacggctcatggggcaggaagaactatgtcaagatcagaagcaaaaagaacttatacgttagatgatgtgaagaaaaagttagaatcacggggcatatatgttaaatctttaactaaaaatggattgatcgaagaatctcccgatgcgtataaggatgtcgatatggttgccgatgtgtcacataaggttgggattgccacaaaagttgttagattggtcccactaggagttattaaaggttaaattgggcgccgataaaaaatcaggcatggatgatccagatcttgaattaattaaagcaagaaagatgaaaaagctacaagagcagttagcctcaaaagaaaaagacaagatcaatttggaactccagaataaaacaaataaaaataaaccagaaggaatcgattctgaaaggaatttcttgttgcgctatctgtacgatagaggtgacgaagttttaaaactcgctgaacagcaatttcccttgcaaactaaaattattataaaaaggttaaatgaattgattcgatttggggagatttctaaaatatctgggggagatctgcttgcagtatatagatcattaggtttgaacattcgagttgatacccaaatttccatatctgatcatggtaaaacgataagtttctctgataaactaaaacaatctaatgatgcagatccggattctgatgggttactataagtaccaccttgtttattttaagatgcatttcctataaagaaagattggacttttagggaaattaactatatcgatttctaatctaatgtatctaaataattaagtaaaattaactaactaaaacaaaaacaaagcaaaactagaacaaaaacaaaaaaaaagattatggaactgatctgctgtagagttttccttctaatgctagtttgtacatttctgctacataggggttccttgcaggagtttcagcgccaagttctaccaaacgtgcgtataccctaactacataggccaaagcacccatgaaagctactactacacccatgttaaacatccagtggttaggtactgaaaatatttcttcaacaaaccaaaagtgccacatttcattgataccaattgtgaacatggtagctaaataaccgataatggttatctttagacccgtattcattgaattgtttggtcctcttaatgctggtactctcctgtcatacatcgcaacaaatccccaacctagtgggagtgcaataaagtgactgtataaccaccaatgagctggtgtaaatgcactgtctctgatggctgtttggtgcaatgatccatcaacaaagttgtctacttctactgatgcagcaatagaccctagcataatgaccattatatagaatcttttttagcctctggatttctacttcctttggaattaatgcaggcatttgtgccattttactatcaccatatcttcgttgattaaatatataagatgtgaactaaaatatttataaataatactagaaattgatggaatattattaaattattagatgaatgtttaattaattaactaaatttctgatgttttgtcaatgttgtcaagcttatcgtcgatgattatcatctctgataaacaagatgttcttttctatgaaataattgtgtcaactctctgaatggttagtgcgtgattatctgtcaatgtatctgagataatttctgtatccttaagtaatatttcagagccattgatatcaattttctgatttgtattattctctgaaatcttattcttgataattgacaatggatcaacaatttcatcgggatcaatatggaagaccgccgtgaaattacttattctattcttatcttttgatagaactgaaaagtctgttttcaagtataacacttctttgtttaaatcatccaaagtattcactgtgtgaagtacatccacgttaattagattaccaatatcggattcgtttaccataatattcgcattctgattatttagaaagttatttaccaatagcccgttatcaacactgatttctagttttataataccttctgtgaattttttagataatgcagaagggatagaattagtagtatttttatcttgaattggaaatacttttgagcaattaatgttagcaatattttctgaaggaatatttagaatattgaaattattcttgacttgctgatctattgcaatagctttccaaattacggttattggatagcttttcttgttgaatatcgtaatatctgaatcatattttccgggtctcaatggaccactatcgtcactgattgtaccgcaattaaatcttgcatagtagtttactgttttgtagcttcctagatccttacttggttgactttgttgacttgaggccaattctatagttaacgttccactcgatcctaaaacagtagattgaagaataaaaatgactaatgttatggtaaatatcaatcgaatcatgatatagacgagatcatttcgtcgatataattttttttattatcttatcaataataattatatagccaaaattcctactttattttatgaagcttctcctgtctataattttgatttttagtttgatatctagtcctttgttaactttttttgttttttctaagagtgtatatggtgacggacttttcatggaagaattaacagcatcatttggcgatagaaacgcagatctgcttataaaaatgaatccccctgcagtaaccacagagacgattcaagatcaagcccagaagcccacagtgcagtttcaactacttgattcaaaaacaaaccaatctttcaaagaagttacttattttattacaatcgaaaaggatgggaaacctttgctgtctgactggttttttaatccaaacggaaatcttaccattgaaatgcagcccagaaaccagaatcaaatatcagtatatggggaacttgatcctatacttgaagcttatagtagcagagagggatctccagtagttgctgctggacccatatttttggatggaggtttatatcactttatcgtcagaattgtaacagtagattattctcgcacaatcttgccagatgatcaacaacccgtctttgatggttggctcagtattggagcagcaaaaaatgcaaacttgactgtagacggtaaaacaattccaaccaaagttctttcttattacgatgaaatagggaatataacatacaatcaaccatctgattccatcaactttacaatgccgtttaattatgaccctaagagactagatgatcctaagaataccgtatttatacatcaagaggtagaagtccctaaacctagtgttctatccgctgacggtgcataccaaggttataccaatggaaaagatgttacaaatgttttaatggtagatggaaataaccaaacaaaggatactatacattttatgcttgctaaaccaattgtacaacaaatttccaacgaatacttgaataaaacaaatcaaacatcttcagaaggactcatgacattctcgttggttccatctaaaaatggatttatggcaatgggaggagccatgaatcacacaatgccgatgatgacacaataaaaatagttttgtttggttttatacaacagttggaaaaaaattgattaacaatctgcaaaattttatctcatactagtcattgaaaatatagattcaagataattaatcaattcagtacaataacaatttatattatgaattttattaaaaaataaatttgggtaatcaattctcatttcttccttttttgcttgaattatttccacttgccttgatttttacttttttgctattgtttttttcttctgatcttgggttagttgcaccatctgcaaatcaggaacttaaattctggaattatgtgggattgggattggcacaaggcatgaattacaataatttactcttatccattgatactgaaacaatcagagtgggaattgatgaggcattaccacccatcaacaattctaatacctttaatacaaaaggattattgtccactgtactattccctgattatagtaagataaaccaaaatttatctggatctccttctacatctctgaatcaaacttctgaatccattgtactccataattttcaaaagctggtttctggaacttggtctttgaatgtatcaagaggtttagttacagattttcatgccaattttaaattgcttaccgtaaatggtatcgataaacattttatcgaactactcaattttcaaaatagcaatggttcttctattacttttaatcaattttccaatactccgataaacggatttgctgacataaaaattgacgatgagctattccaaagtaagtttcctttgacaattcaaatttttaatattaatactattgtcttgactatcaaagacgaaacagtaagcaaaattttctataataataatttgttgggcattactgattcctttaagaatttcgaaggtgatgaacttttgatttttgaggaagatgaaaaataacaatagtttcaaatggtcgcagtcatttgtcgtagtcaattatttaatataacagaaagtacatatagtagaatatggtcgaaaaaagaaatagtgaaagaataaaagacgaggatgttgtaagtgctctttccagcgaaagccctgaaatttctgaaatttctgataatgatttagaagaatcaaaacctatccctactattattgatgatttagatatacaagatattccaggtattggaccaactactgcaaaaaaattacgtgatgccggtgtactgactgtgatggacctcgcagttacaagttcagaagaactttctgttgagattaactcttcaaaagaaagtgcagcagcgttcattattgctgctcaacaacttttacgagattctaatcttttagacaaggaatttgttactgcagatgttgcattagaaaaaagaaaatcattgttgcgatgtacaactggttcaaatgctttggataaacttcttttggggggtatagagacccaggctgttactgaattttatggtgaatttggttctggcaagtctcaaatctgtcatactctgtgtgtgacggctagtcaaccagtcgaaaatggtggatttggaagtggttccatatatatcgatacagaagggacattcagacctgaaagagtagatcaaatagctgtgtctagaggacttgatccaactagcgttttaaaaagtatcgcagtttgtaaggtttacaatagctctcatcttgaattgatcataaaagatcttggaaaatatattaatgattttaaagccagacttgttatcatagacagcattatatctttgcacagggcagaatttgcaggaagaggcacactagctgatagacagcagcgactcaattctatgctacacaaaatcattagacttgctgagatttataatatttctgtagttattaccaatcaggttcaatcttcaccagataccttttttggagatcccacaaaagctgcaggaggaaatgtattaggtcatgcctcaacctataggatttatctcagaaagtcaggtgaaaatagaactgccaagatgatcgactctccctatcatccatattctgacactaaatttactgtaactgagaagggtgtagatgatttggaagaagaaacaagttcaaagagagggaaattaaaggaatagatctactctctttctttatcttcatctttattgttgttattatttgaagacatagcagtgtcaccctttgtgtctttttctttgctattctgaccttcttttggggaattatgaactaaaataataataggtattgacatccgatcagccaccacaatactaacaccattctttttatgataatgatcaaaaaatcctttatgatagaaatagtggttgtttaacatattcattaaaataatagccttttgacataatgccaacaaggtcttcatctgttcaatcaaatctgaatttttgttttttatttcatcaaggagatggctttggtatttgattgcggctttgattccgccatatttttttaactcatctataaaaatttgatagcctctgtctatattgagaggattttcaacattcgtgtttgattcatttttactatccttattattatttgtctttgctgtttctagcatataattttgaaacaactgattgatatctgtaatctcttgttcggtaatacctttctgataaagggaaagcaataaaggtcctataattggctgcatggagagattttgtctgcttatgttaagttgctcatttaccagtaccaattcatttctttttttcttgactctgtcttcaaatttgagtttgtcataatagttttcttcgacatctttaataaaaaaagcaaaacaggatcttcaatcatatcaaaatcctttaaaggatcacctatatctcttgcaatttctgaaacagtcaaccatagttgttggagatcgtcaattccaaatttcattgtctctaattgcttatatatttcaaaattttttttatgagcatctaaaatagattgatggaaactaatatcgctatgtaaaatggctagccgttttgattgatctcgaatctgggtctcgttctgtgctatatcccaccttagctttacggctttattgtattccgctactatactggtaacatcatatccattttccttaaagtcgctaaataacttggtgaatgactctagatctttttttaaatcaatttcacaatcttcccataatattttatcaagtttcataaatgtattatggagtactattatagactgtcttttttgttctaatatcccaattttttctagtaggtctctcttttggtaatcatatacattgatttgttctcccatcttttttcactttcggagagatctccaagttccttcttcttttgttcaacaaaatctgaaatgaccgaaacaaatgtcaaaggtgttttttcactattttgatttttcgttgatactcttttcatactcttttcactattttcatacaggtatccataattctccgtcgagaaattaagtaggtcatctatccacgcagtaacaacagtgggattcatgccaacctcgttacattttatatatatttcattgacaaaataagataaactatctaaatctgaatcaatatcttcattttcaattgctattcctaatcttttcaatagttgtaaaatctgaatcctttagtgcactgttttatagtcattcctgattttctcatgtttacagcaaatcgcctcaattcttctcttccactcaatgattctattagacactgatccaggtgctacgccagtttctgtagcgatttcatctctggaaagtccaaatatgtaatcctgtacgattaattcttcaacctgtctactaatcaattacttttatccgaggtcacgagatttatgctttcgtcatttttgtcaattttatcgtcatttttgtcaaaaattcgtatatcatcactttgcggaggaaattctgatagcgcaattatgaattatgctatagatattggactatttgtctgcctaccttccctaacaattacaggaaagtctatcgtttgatgatgacaaattgttagcaagaagattcgtcccttcatgatccaagagaatactcatgaatccaagagaagaccctttttgttgtattttcttaactttttcattggctaaggtaaaatgcattgcaaaggataaaacatagagtttttaaaaattggctaatcattaagcattattgccagtatatcatccgctcttaaactttaccagcagtataaggcttcctgaatatggatatgttggaattacagatatcgagaaaaatataatcaatacaaaatattttcaacgccttcgaagaataaaacaaagctccaatctctttatggcttttccaggggcatctcattcaagatttgaacactctttgggtgtcatgcatattgccggtgaggcttccacacatataatcctgaattccaataacaagatcaattctacatctataatcgatttgatggattcaattaactgcaaaaccgaaatcaaaaaacaaattcaactaacaaggctggcagccctattgcatgacataggacacgccccattttctcatacctttgaagaatttctaaaactagtcaacccatctctagattggaaacacgaatacttgagtttggaaataatatacaagaaattcactaatttggttgaagagtcctctgaaaacaaaatcgagtgttatgaaataatggcattattatgcgatctatcccctaattttagaattattgaaaatacaaaaaggatcctaggaggaataggcgttagtaaagagattattgctaggatggatgcttttttggagtcaaattggtatttgaactatcttataaaggaagatccgtacaatgttgacagatttaactacctaatattggattctaatagaactggggcaaaagagtatggttttgtagatgtagggagaattgttcaaaatttgtacttcttaaaagaagatagacttgtaactgtttcaacccaagccagagaagcagcaatgagattctttgaggcgtatgcccagatgcacaggtcaatttacttgcataaaatatcccaaggtgctgatgtccatttgtcttatataatgaaggaatctgcaagggaatccaactcggtctttcagaaactatctaatccagagatggaatctatattagaattatctgatgatgtcttgatacatgaattaacaaaagtagaaaatgaaaaaacaaggaaacttgtagacgattacttgaatagagatattttgtcactcgttcacgaatttgatctgagtgacaaaaacaggattacaaagattatggattcaaaaggatcaaagggattacaagatgaaattagaaaggaagcggggttgcctgatgatggggtagtgttggtaataaatattacaagaaagaaggtaacaaaaccacctgtcgatgagaccactttgaaaagactgatgttttataatactaaatctaaaaaaattagaaccattagatctcgattttataagacaattttaccctaacaagaagtatagaatattcgccgaaaaaggacacaaggaaaaaatcaagagtattatttcaacgtggacggatacaaacatgtgagatttttgttgcctgatttaacgaatattttgaataactagataattatgagaaagtcgagtagagaatagccacataaactttgactaattttattgaggattggacaaataatagtgaaaaaatttaaaaggaattgattaaaagtaagaataattactattaatcaaaactaaagtctattccactgtctcttatggtgtcttctatggagtccatcatgctgcctccaccatcgttatcattgttgtcaccatcatcattactgttatcatcattattctcctcgtcattcctgttactgttatcatcattactgttatcatcattattctcctcgtcattcctgttactgttatcatcattactgttatcatcattattctcctcgtcattcctgttactgttatcatcattattctcctcgtcttcattagtggtagcaacatctgtagcatcagttgtggggacgtctgtaccggcagtagatgcactcacctgtcctggactgcttcctgctatcttacaacatattggaccatttcctgtatcttgattgaattgttgaatttgtgcaaaaggttgtaatccacctgatgctgcctgactcatattaccactatttgtcgttgaatttgaagactctaacatcatgttatagctagataactgtgcttgtgtaaagttagtagctgtaatatttacagagtaaaatgcttgtaatgtttgtggaccatctaaacaaagaatcttagatgttattttgttgtttccttcattgatgtttgtataattgcttgctactgtgtattgccagttagaataatcattgtctccttgaacacctgtaggattaacattctgatagggttttacattatttatgatgacagaaacatcacaatctgatgttacattatcctttgaaactcctttgattactagtgaattgtttgaatttaatgggactagatctcctttatctggagaaattatctttacaccgcctgaaagctttgtaatatttgatactgtgtcagaaacagtgggaacagaagagtttgtcgtacttgccgaagtattttgctgtgctaatacttggatgtttgcattatagttgatgtttgataataataatactatcaatagtcctgaaaaaataataccaagcctttttatcatgattattttgatatttatatgtatattaaagtttgattagatttttctatatgataaaaactattgatgtgttcttattactgttcttattaaggtaagcctttccctaatctcatctccctctcacacgtgatctgttcttttcttaaatcgattacaccataaactttaacaattccgaaataacattatcgacgtggaagaaaatactgacagaaatcaaaagactctgcttactttctcaaacatccaatacttggttgagggtttagacgtattactccatacaaatctagatggtgataaaaggacaaaagtaataaaattaagagatgatcttagagattacatcaataatttcttcaatgaatattcttagaaccatgtttaattccttctttagattgaaaaattaagaatatgatacaatggtaatagtattttgaaaatagtactttctggaacacctggtgttggcaaacacaccatcgctacaatcctctcatctttgtttgataaagtacccattgttgacattaataagataattttatctgaaaactttttaatttcttcccaaagaggcaatcatgatgtagatattcaaaagtcatttgactttttgactttgttgctttctaagaaagaatatcaagatagtatcattgttggacatcttgcaccttatgtaatagatccgctgttagtagaccttgtggtaatattaagaaggtcgccatacgagctaagaaaaatatatgaagacagatcatattcacaaactaaaattagtgacaatatggttgctgagatcttgggcataatatcttatgatgcattaaaaaactttgagttttccaaactttctgaattagagatcgcaactagtattttaccgtccttatcggctcaaaagattgtcgatatgtatggggataggaagcaaagagttttcggaaacatagattggttgccacttatccaaaatgacacggatatgttgaaatttttgaattaaacctaatttgaactgacttcatatatatataccttaagacattatccaagaggataatgtctgctttaatttcaagaagatttgctgaagaaagtgtacaatttttaggaaaaaaagtttcaattgagacttcagacaataaaacttatgccggtattttgactggtttaaacgaaaaatttgacttaatattggaccatgtagaatctcaacaaatccaaaaattaatgataaacggtttattcgttaaagaggtaaagctcttagagaggccatttgatttgaaagctctttctgaaaggttatcaagagtattccctggattagtaaagattcgagaggacgtaggtgcaatcattgtaatggacaaaattaaggtgaccgaatctggaatcgaggaaggatctggtttggctgcttcacgtgtaaaagcgatttacgatgaattccttagggagtccaagaattaatcttggtatttgaggtgaaatgtactgatttagctgctcggatcggtaaattaaccactcctcatggttcttttgaaactccttcgtttatacctgtaattcatccagtcaaacaacaaatcagtccaagttttttaaaaagtcttggctttgaatgtataataacaaatgcctatatcgctttcaaattttatggtgaaaaggccgaaaaacagggaattcatcaaatcgttaattttgacggtcctatcatgacagattcaggaggttaccaagtgctcgaatacggtaaagtcaacgtaacaccttcaataatggcccaatttgaacttgatattggtagtgatattcccgttccattagataaaccaacaggctatggtttgccttataatacggcaaaatcctatgtaaatgaaactatttcaaatatagatgaaacaatcgatgtcatacgaaaaagtagaacttaccagaatggggataatagcaatgatgatattttatcatcaaaaggtgaaatatggactggaacaattcagggagctgaacattttgatctcgtacggtattccgcctcactcttagataaaaagggtttttcattttttgcaattggtagcccggttgaactgatggaagcttatgagttttctacacttgctcgacttatagaagctaccaaattatctataccaaacaaacctatccatttatttggtgcaggtcatccattaacaatacctcttgctgttgcattaggttgcgatacatttgattctgcatcgtatatcttgtatgcaaaagctaatcgttatatgagttcttcaggaacactgagattagaagatctctcgtatttgccctgctgctgtcctgtttgctgcgattattcagttcaagaattgatcgatgaaatcccacaaaccagaattattaatcttgctaaacataatttgtatattctaaaacaggagatgtctgcagtaaagcaatcaatttacgatggtaggctttgggaatacgtgctgcaaaaagcaagatctcatcccaaattaatggatgcaattcatacaattaagaattttgaatatattcagcaaaatactccggtctttaagcaaaaagcaatctatttgtttgaaccaatagatcagtttagaccagaactaaaaaattatcgcaatatgctaattgataactacaaatctccaaataataatatcttacttttatatccagatcaggggataaggcctttttattcctcctctgtattacgaaaactttccagtacttttccggaggcttcaatttgtctttataatcctttttttggcttgattccggttgaaatatcagatatttatccaacatctcataatatatttacaaaacactttgacgaatatgatcctaaaagttatactgaattcctgaaattattaaactccttcctaaaaaataatacttttaaatcaattcatataattgctaataagttcattaaaagattactacctattattgaaatcccaaaggagaccgaagtcataattgaagattttattggttataaattagattaagttagaataaatttaatgatttttgtttttgtttttattttatgactatattacaataaaatgattaaaatttagcaccgacgctatctttaatttccttagataattctgtatatccgtttttatctattattaccgcatttatgctgtctccagtacctgcatttcttctaattgctgctgcaatggcttgaattgctactttataagcttcatttacgctcattccttccttaaattctgactctaaatatccatatgcaacaggggacccactaccagttgaaataaaactttccgtagtcatcgaaccgaataaatctatattatagatttgtcctttttgctgacgaaaatcaaatcctcccatgataatctgaacataaaagggaaaatatctttgattaaatagaatgttagaacataaccttgcagcggaactgactggaattggctcttttttagacaatctgtatatatttgagttgtatctcattgtatcaactagattttgggcgtctgcaacaccacctgcaattgtcatacctaaatgattatccactttttgtattttcattacatgcctatctgcaataaataatcctgcacttgctcttgtatctgcagctaatactacaccatcactacaggtaagagcacaagtagttgttccctttttaatctgatctaaaatttgttgaggatatcgatcatcattaacatgcatttatatcaaatgataaaagactacatttaagcattgttaattctcaattaattataaaataattattatagtcgttttgttattatatattatagttggcacaaactctatacgacaagatttgggataatcacctagtatattctgatgaaagtagtaatttgtcccttttatacattgataggcattatgtgcatgaagtaacttcgcctcaagcttttgatggccttaggattaatgagagaaatgttagaagacccgatcttacatttgctactgtagatcataacgttcccactactaacagatccttgcccattgtggatcaaatctcatcgttacaaatacaagcattaaaaaataattgtaaagaattcggaataagactttttgatattcatgataagtatcaagggatagttcatgtaatcggtccagaattgggattgacacttcccggtagtacgattgtttgtggcgatagccatacctccactcatggggcattcggatccctggcttttggtataggtaccagtgaagtagaacatgtattggctactcaatgtctatggatgaaaaagtcaaaaaattttgaaatagttttgaatggcggtttaaagcaaaaccaggctatatcgtctaaagatgttatattaaacattattagaaaaataggtacatctggtggttcaggatcagtgattgaatacaagggaaactacatttcatccctcacaatggaaaaacgcatgactatttgtaatatgtctatcgaagcaggtgctcgagcgggtctagttgctccagatgaaattacttttaaatatttaaggggaaaagtctattctcccaaaaatgaattatttgatcaacaaatagacaattggaagaatctccgatctgataacggagcgcaatacgataagactttctctattgatatcgataatcttgctcctcaagttacttggggtattaatccagctatgactatcgatgtggactctgcaattccctctcctgatgaatattctaacggaaatgatgatgaaaaaaaatctgctattaaggccctcgaatacatgaatttgaaacccggtttaccaattactgatatttcagtggatcgagtttttatcggttcttgcacaaatgcaagattagaagatttaatcgaagcttctaatgcagtgaaagggaaaaaagtatcttctactgttaaagcaatggtcgttccgggatcacaacaggtaaaaattgctgccgaaaaattgggattggataaaatttttatgaatgctggttttgaatggagagagcctggctgcagtatgtgcttaggaatgaatcctgatatacttcaagcaggtgaaaggtgtgctagcacttccaatagaaatttcgaaggacgccaaggtacagggggacgtactcaccttgttagtcctttgatggctgcggccgctgcaatagccggaaagtttgttgatgttagagaatgggtttaagtttgatttattacagataaaaattataggtgtatttatggaaccttttaagaatctgacaagtaaggtagttccgcttgatattgcgaatattgatacagatcaaattattccaaaacaattcttaaaacttttgggtaaaactggatacggtgaatatttattttttaattggcgttatgataaacaaggtttaccattaaaggattttgtattgaactctcctctatatagtggaagacagattctattaacgcgtgaaaattttggtataggaagctcaagagaacatgcggtatgggcacttaaggattatggcttcaaagtaatccttggggtatcttttgcagatattttttacaataattgttctaaaaatggtgttttggtcatcaaaatggacaagaatacaatcgaagatttcttttcctccaaaataaacgacaactttgaaatagatttgatacaacaacaaattaagataaattctcaagtctttgattttgatattgaccctacattaaaaaattatttggtaaatggattagatgaaatttctaaaactctagaactgaaaaatcatatcaagcaatatgagaataaaaataaagtttctgtagaatccgaaagtatgatataaaaacattcagataaaatactatagaaaaaaaaatagttgattttacaaagggtaaatctaattaaatttattactgtaacgattgaagagtttcttataagatatataactactattttttaagatatgaaaataattacatcaaaattgactcttttaatcatactgtcgacaattattgttgttagtagtttgacgatttcacagactagtatggctgcaaatattgatgaaaattctgtatctttacatcctatttctgcacaaaatcttgatacccattctgattcaaatcaatatcctacctcttttgtttggtctaaccccagtacttctaaaatgactgatgttttgactgctagttttacaaatattcttgatacccaaatttataccggtttagacaagattacaaactagcaaaacaccccctttttttttagattgacaaatgaatgctcataagcatcttgtcaaaaatcgatgcgtatttgtcgaattccttttgctcagctagaagggaaaaaatataaatattattgttaatagtcaaaaaaatctgtttagttttaaacaaaaaacctgcattttcaaagctgtatgttatgctatcagctgttttgtttatgctatcaatatgtatagtggatatattgtcaaatctaaatccctgattctggtctacaagtttctgaactatatcttgtgtattgatgctttcgttgattgtaaagttattttttggaatcataatattcacgacaatgttttcttgaaagggatctttggggctttctttcggtgatagaaatactattatgtcattggtctgattttcgttattctttttatcttcaacaatcttccaatttgtcggatatgctatgcttagtgtgttatcatcagttgtataatttgaccagaaaatttcttgggctaatgctttattcaccgaaaacaatgagagatcctgtgtggtttctattaggctattgtggccgaaccaactaaacaaaaacaagagtaatacacatggtaatgcgaaaattatagtgttgaccttcctaatagacatgctaaattctattaccatattataaatagtattttttacatttctatttattattatattaaattttaatcaataggttcatatgataacctacctatgttctaaattatttgggtatttttaggtatgacttgtataaaagtcctaatgtaggtatatttgcaaaatctaacgataaaatagtattacttccacatggttatgctgagacgaagttaaagaaaataacggatattttagaagtggatccaatttttgtttctatagcaggaaatagaataattggtcctatggtggtcctaaataataatgggatgctactgccttcaacagcgtcagaggatgaggtactacatctaaaacaagtaaccggattgaatgtgtccaaactagaatcaaaattgacagctataggcaatctaatatccactaatgataaaggagcaattgtgtctccattatttaagaatgaatttgacaaacaaatatgtgatgttttaggaatagaatctcacaccatgtctgttgctgatttcaatcaaactggttcgatgattgtatcaacaaatgatggtgctgcggtacatccaaaggccacagagaaagaggttgaaactatttcatcagttttaaaggtagaggtagagcctttaaccatcaatggcggtattccatatttatcatcggggattgtttggaacactcgatctttgattgtgggtaatctaacaactggaccagaattaataatgttgagtagggcgtttaaaatgtagtatttttaacgttaggttgacttgttctaataaatcaaatttaaagtaactcatttatttgtagttttagaagatgatgagtagatacgctctgttaacttaaggatgaatcttctcctcgttatggtaattgacaaacagattcaaccagttccgtacatgatttagtttgcaattctttattttgcatggaaagtaatcatcaaaactttcagttcgatctttgatatactgcatagttctttcaattagacttttctcaaacgaagaatggatgcggtgttttagttttaggaacccacatgcttgtggataccatgtgccaccatctgtggaaactggatgttttccatgattctttattacatctgagatgagcctctcagcaacaaacatgtttctttccttggatttattagctaagaaagagtgcgagaatttgcctattttctggttcgattgctacccataaccagatgaattcaaatccaactttaagcaatgtctcgtcgatgataaattctgaaatcctttttctctttgataatatctttttaggatgatacttttgaatccacttccagattgcaacatgacttctcttgaccttgcggaaacaaaacatggctttagcaacgtttcttgtcgacaaacctagaaagtacaaatacaatgcacgaccaatatatgatgaagatgttttatttcttgtactggacatactggaaatagaccatctttaagctatagatttatcgttaagttaacagagcccgtagatacctcgtcatctttaaatctaattaactactgaatttctttatacttttgaggatgttcttggatgcttttttaataccttttaattcctttagaacttctttttcgtaatatgagagctgttctttttctttattgtctgattctgttaaaatagaacttgataggcttatactatccttttttgtagaatcaactgcatccttattttcctttttgattttactagtatctacattttttttattgttttttgtagaatcaactgcatccttattttcctttttgattttactagtatctacattttttttattattactaccatttgtcatactagtgtataatccaccctcataataaatatcttaattattttggtttttatcgaattttacaatgattatttcaaaaacatatgatttgaaaatgaaactaaccatattcttccaaattaactttgtgattttagtacaggtactcaattcatcctggtagcatattgcaatattacacatgaactaaatttacaagaagcgttctcaggatccatgcggatgtttgcactagaaaataattgaaacattgactaaaagttaactatccaaagaagaggtgggaattctttgatctatatgtcaatagatcagatatgtaaaatattgatatagatatagactatatacaacataactataagaaatggaaactatgtatgaacatgaatccacaaatgctcatggactttgaacttgaaaaattaagagaattaaaagataattacaaatggatttattcaaattatgaagtttttaagagaaattataagaatcaatttattgcaataaaagataaagaacatctggataatgacattgatcttgaaacattattacaaagattaaaaaagaataatttcaatggacctattgcgattgagtatatttacggttaattcctctactttactatactttactttataaaagtacaaagttagttaataaatcaacaattttacatgatctaaagtttttatgattatacgtatttattattagatatcatcaaagaataatacctgttgtcatattccctatttattctcacatactaattacaaatttgtgttttgggtttttggttgatacgagagtaataattatcactgtatactacatcttctcttggaataatcagttccttcactgatactatggctggtgacaaatcaataacatattttctattacaattaatgttatatacggatgtgtattcaaattttcctgttttctcaaatgttatttcatgtccatgaatatccatataactttcattcaggatttcggatatctttagatttaatccgtcagtcatttttttcattttttttctcgtctgattactatttacttctggcattattatcatgtttcaatataatgtccgtagactagaagatggtaatggatttcatttcaatttacttatatacatctagtttcttagaaggattagtatcgttattttctcctgttatactaaggcctctagtcatttctttctttgacccgctactggcgtaaacccaatctactactctctttctgtatttggttgatcctatttgttatacaattctttagtagcggattatacctttgtttctaatttttattatttgtgttttataacgaatgtatatagatcgaccttattagctatcggctatcagttcatctattggttaatagaatcatttaccatgtgatcaattcatctagattcttaaaaatgaaaaataatgaaaatctgaattgttgacgaaataagtcataaaactttaaataaaaatattattcgatttaaatcaaaaacaagagtgactccaatcccttgtagtcctattttattttatacagaatgggagtagtttttaatgatgatgtctaccactctgacatctcaccctgttgttactttgaattatcaatgctaaatccatattttcaagacttttcgttgtgtttatataaatatgataaaggaactatatagatctatatcaactataatgtataaatataagtattattacttaaaaagatgacaagcaaatcaactacatcgtccttacaacttattcagccttacatggaaaattttcaagaaaattttgcagacataaagagtaaaagtaattcatattcaaaaaccaatactgagaaagattttttcgatttaaaccacgatataaaaaaattggaatataaccagttggtttttcctaagaagattagaaatcaaaaaagccttaaaacaatgaggaagatctctaaatcattatcaaaaattgaaagagagctgagagcatatgatttagtcgacaaggagattttaaataaaaagggatcagggggggaccaaaattatataaagtattttgaaaatacacttaaagtaagaaaacaaaatctgttatcaaaatcaaataatataattcaaaaaatcgaatctgttaatctatccataatagatataccgtttgatgacaaatctttacataaaagaacaaaaaagttgtcttctaatgtagataaactaacaaaaggaattggaaagagagtcatgaagtttgatacggataatattatcgtgcctaaaaataataatatttcaaaaaatatattcaaactacaaaaaagatgcgagaaattaaaattaactctggacactttaactcatctcccacaacaatctgatataagaggtggaggatatcaggataccaataacgtcgtcataaagaattgtaacaagatacaccgaatacttcaagacattaataatattaactatgctacaagtttacttagacaagcagggtcggaacattatttgatgaaggcggttgataaaataaatgatgatttacaagagaagcaaagacagtttatcgatatgtgtaagcacttttcggagactaaaaccacacccgttaatgaaacaaaagtagatacccagccaaaaaatgcttaattctaaccttaatttcaacaatgtttattggaacttctaaggattgagaaagttttgcaaagatgtttgtcatctttacaaggcctacaaagatgaatattctaaaggatattattcagagggacataaaagatgtatagagtgtaatttatttttggattgaggtggaatgaggtgtcttgttgtgaccatgttcttaggataaaacctcataataatcgatgtaaatcacgtttattaaaactcgctactagaatgtgatttggtaaacaacaaccatgataaactagggcaccacacttttagtcaatttaattagaaatcatttctctatgtttcaaaatcataattatataaagaatcaacttttcattcagaatttgaattatcagaatgtagttgttatctcttcatcaacctttctcatgactaataaataggaaatataaaaagaaaaggatatcaatgttgagaaacattacatcttatgccctgtaaaggtaaatgcgcgaaagaaaaacctataaaaggctcttataaagataatagcgctaattcaaaatgttccatgtgtggaataagatattattctgatgcccgtagatgttattgttgtaattcattattaaggaagagaaaatcaagacatcattctttaagacttaaagaagaggccaatttgataacgcgttattgattaatttatttttttgacaatttttcaagttccctatgaatcttggatcaactatgatattcgatgttagtattaatgaaatgagattctatttttccaagatctcttttagttagaacagaatttatatcatagtctcaattttttctatgaaaatctgggggttgaattccgtctgatttgagagtgaggttagttttggccgcttaatgatgttttatagcaggcttattaggagaaactgtaaaacgaatcaaattatattttattaataagaaaaccagtgctgttaatctagttctgaaccacatctaaaacatttgagatttccaacaatgtattcacacatcttaaaaccacatttaatgcagtctattttatgtcttccatgactttccttttcctctgatgaatcttcgagctcttctaatctgacatattgaaacaacaaattaggaatgacaatgattttcattctaaaaatactactattgaatgtcttttattatttgttaacatgttttagatgttctatatagttatgctgtgaacaaagttaagaacattagtctagttaaattctaatgcccgcatccgtttatgaatactgcctagatacctatgtctatcatatttgtggttattaatactagaaaaaaaatctttatctgctctttctttgtccatatatctgaatagaactgaagatggttatcttaactttttttgatcaaaagatagtgatttgattattacgagaaattcaaagcaggtattatttccttttgagatacgtactcagattgcgatcgtaattcaggacgtcttgtttttctaaattctaaattactttcttttgcacgttctaattttcaatagaataacagtaactatatatgattcacttagaaaaactttgcaaaatatgttctatatataatattatcaaacacaataaatacatccaaaattatgataagttgagaagtaaaactttatgagtattaaaatgtttatcgattttatgaaattgtgcattcgtggtgattgtagtgcaagtaattggaaataataatcctaataaagttaagaacgacgattcgggagtccttattgtagttgaaggaattgacgggtcaggcaaatctacgcaaattcatttggtagatagatggttaaactctaaaggatacgatgttttttttacagaatggaattcttcggagaccgtgagagaaattacctccaaagggaaaaaaaaagcaagattgacaccaatgactttttcacttttacattcaaccgattttgctgaccgatatgaaaaaaatatttatccattgttaagagctgggtatatcgttcttgcagataggtatatctacaccgccttagctagggatacagtaagagggtgtgacaaatcttgggtgaggaatatgtacagttatgctcgaaaacctgatctaactttctatttcagggtaccaatcgaaactgcggtaaatagaattatttctggaagaccaaagttgaaacactatgaagctgggatggatctcggattgagtaaagatgaatatgaaagctataggatctttcagggaaggattgttgatgaatatgaatcgatggttgacgacgaacattttatagtaattgacgggacacttgatatagaaaaacaacaaaataatgtaagaagacacgtcttgaggacattgaaattgaaaaatcagattcaaggtcatatacttgaataatattggaaagggttactagggaatagaaaatggactcaagaacattaataaagaaaacatattcgtctaatgatagcgaagacagtaataaaattaaatttattaaccattctggaataaaatatctcaaagacattgaaatacatggatcgttcatagtaatcgaggggcccgatgcctcgggaagaaatactcaaattcaaaaaataaccgagaaattagaggctgatggacatgcagtggttaataccggattaaaaagatctgatctcatatcaaagggaataattgaagcaaaacgaaactatcaggtcggtagaagaactatggcactttattatgcagccgatttcgccgatcaattggaaaataaaataattcctgcgcttaaagctggttttgtcgtaatttctgatagatatatctacacacttatagcgagaagctcggttagaggaataaataaaaattggttacatcaattacatagttttgcgatcaaaccagatcttattttctatctgaatgtggatccatataatctgatacatagagtttttaaaaagaataaatccctagattattatgaatcaggagcggatctaggcatatcggcagatatttttgattcctttattaaatatcaatatttgttgaagaaagagtttgttattatgcaaaaaaaatatggacttattgatatcgatggtgataagcacattgaagatatttataaccaaattcaatcaaaaattagtgaatttcttaatcaaaataagaataatggtgccaaagtttaattatagaattgagcacattttgagtaactgttctttgtcgtggaactaatctatctacagccttgttaataatttatgatatggttttcaatgatgcttattaaacaatcgaatagatgaaatgccttcagataagataagcttggtacaacgaaaaagacggatttatctatatgaagttaatttatgttatcaattccatttgattttgaggagatgcgaagctgattcttgaaattgatattttattacccccttctttattatgaatgcgtaccaatcaacgaaatcaatcataatccttgaaattctagaatgaatatagattttccgttttctctttatagcgatgaaatttttcataatgattttttcgtatcaaatcaacttttatactttaatttacaaagattttgatttctattttgctacgatagttattacatactctggtgtaagtatatctctataaagtacatggtaactattaggacaatcgttaaatccttcatcgagatagcttgttcatggtgaacaagagcacaaatttatactcagaggaaggaaaattatgtatgggttgctttcatcaaagatttaatcatcgatataacgtgggaaaacaaaataatagtcttttatgtgatcacccaaaatgcaattgtatccagtttgtggaatggatttgatcttcattaatcatagtttttggtcgtaccataacagtcagtaaacgaaagtgcatctgtaagttattgtttaaatcctaaaatatatccacatctaaatctatctttttcttgcacactgatcctactattaataatttcgataaaatgttttgttactttatgagataaaagataaatgattccttcgcaaaggatcgtatttgattcttgtctatcatgtctacaatgagattcaccactcactcttaagtatagattaattatagaaagatgatatatacattttatataatatcataagaagagttaggcattcttgcctttccatttcttcttgccaggttcatatttttgcttgattgtttatgttagactattataagccaccattcacaaccaatgttcttgtagatttaccgtaattaatgaaatcattaaattttgtctttcgtacctttgtaacattcgctattgtacttgtaattagtggattgttggatgcttgatgttgcctcaaataatccaaggcaatatcatagtcgtggatatcgccaagcattccttgaattttttcaagatgttcgaggatcttgtgattattattgcgaattaatacatttgtgtcatcatttatattctttttactagcatcactctcctctttatttgtcacaagttcgattaaatagcgcaatttctttgaatcttttcttagttcatgtagctccataattctactatcatcgccgattacgattgggatcctcgcttctatattcttctttaattttcgagatatttttgctaatctttttattgaaatctcttcaaaattcttttcagttttatttttgtcgtataaacttgggacaactatatcttttaaatctaaagcaattgttctggcttcttcaagttgattttctctgttcagtacctaaggggttttcataatactctaattgttgttcaggcatcttgccttccttagccaacttttcgagaattatatcgatatctcgtatattactattaattttgaacagtcttttacccacactggcaaactctttgattttctttttcttccgaatttgtttaggacttgactggtaggtcgcttcgagtcttcgtagtgatgttcgcatatggtgaatgttatcttccgttggattttccaaatacttgtctaatttagtataaacccttttgatgttttgagtacagttatcagcatatgtattaacatcaaaatggatgtagtaatattccaacatataatactacactattactatactattttaagtattatatacataactaagagacttacctctcatttcaaagttgatatgtagactacctaaatataccaattgtcaaaaagataggatgatacatttagcaataatcattcgtttacccttaaaagcaatatataaacaagactaaaaattcacgcaatttctatattttattttcagtttcgacaagttggcaagaacccagtatgattgaattattattcaatttttttaggtctccaaatatctacaagttcagatttaaaattacaatgcagatcgatagatttccaattttcaatacttaatttcaattgaacgaaagtgcaggttggtatccttatttttctgttgatcagcatacctgccaattcttctagatcggggttgtgtccaatgaccattaatttttgtttgtcatttggtactgtagatagtgcgcttatgtaagcgtcaataccacctcggtgtaatgaaaaattgacttcaatgagatttttatagccagaatgcctacacaggtatttagtagtttcaatagccctaagcgctgaggaggttatgatggtatccggaaatatgttcattttttttagatgttctcccattttgatggcttctcgtctgcctctattattaagtggtctgtcgtgatcatccacctttttatccttccaactggattttgcatgtctgagtattaataagactttgttaatatcctcatctccattgacaggcatgaaaacattatcgataacatactaaaaaagtatcctattatttaaatcccataattaccttatgtggaatcgactaatctctatcttaattatttcttatatacattgctcctcagtcaaaatcattaacaaatgaccaaacaaggaatatagtttagaaatgaaactagaaaacaaaaatggtacgtagtactagttttactcttgtccggcgacgttatttcctacaatgccattaaattcgaggacaactttattgcaggtagggcaataacattttctgattcgcaagatgctgcttgattggataaggatgattagcaaggatcgggcggcattgctctcttttatagaatgcacattatccgtgagcctcgtcgttatcaaaccaatttacaagatttactattaagagaattattagtttatttcattatagcgggtaatttcctaatatgtttatgaattgtgaaaaattatttgattaagattcgattatcaatgattaacacgttattaggtattatccttgtatctcttagttaccaattgggtaaatgattcgtatgacaaaatattaaataatatggaatcgcccggatatgattaattatagatgcgttattcacaacaaaagatttcattcaattaggaatagatgtgtagtggaattgcaatcaataaatatttcaagaaaaagattcacaataaattatctattcagtaattttaaagaaggtacatggatagctaccaacattaagtattgaatatttgtgaattgttggaccgaaataaactagttatttctatcaaagataaaggcatcaattggaagtccacctggcgtaactttctcatgcttttgtgtatcataataccgtaaatcatcatcaagttgattgggatattggtattaacatccctgctttactagtacacctatgacatgattgtagcctttacttttcatacgaaatcaaatatcttgtatgtatggttatgtccagttctaatataaggtagttgtatattttgacaatagagcatatatttcaaacttatagaatagattagtttccacacccataatagtggactactacttggtgtctttgttatggaaaaagcttaatttgcgcaaaggattccactatgataattcaatgattcaagaacctgtatgtgatgaatgttccaaagagctagaaagtatgaaatcaatttaaaagaaccttattgtattgaccccaccaatacatttattagtttagtaacgaagataatggaaatgtgaaaaccactaatcgtttttaatcataaagaattatagtaatcatgttaattcaaagaaattaaattagaggtgtttgaaagtaactcatttgaactgattactattttcaatttatataatttgtctgcacaaatgatcattcatttattaaatgttaagtcgtataaaataactacttttatttgtaatccatagctctggattagtgaattaatgaataaaggggtaataaggatagattagcgctaaaaacacattattgagtaactatattaaatatctaaatgctccatagtattcgatagacaacgaaattattattatggtttcaaatgcaataactcgtgcgtgttattgtgaaagaatcataacgatctcctatcatttttgataaagtatgtcctactgcaaaaagattgaaatttcaaaaaaaagtggtcgtatttcataataatttataacgtatcttgttattatttaaaatatcaataaaaattatggacaattaataaattaaatcgataatgataaataataactgttatttgtctatagatgataagaaaattgaaaataactattctattttatgctatctcgtcatccaaaaatgtcaagtcatttccttttattattatccttagattcttgacttactcattgaagagtcaaataatatggtggatggaaatggctctatgagcgataatcctgggggacttccgttaactaaatctcatatggagcgaatatttcctaaattaaccgatgaacagattagtcgaatgaaagagcatggtcacaaacgtgcagtaaaactcggagaagtcctagtcgagcagggatatagtaacgttcctttctttgtagtaatatcgggcgaaatagagattcttcgtccttctggcgacattgagacccttattaccgtacatggcccaggtcagtttacaggagagatcaacatgctctctggacgtcgggctctctttcgtgcacgtgtaacaaaatcaggtaacgtaattgaaatggatcgtcaaaacatgatggctttgctccaaagcgacgctgagataagcgatatcttgatgcgggctttcattctccgccgagtggaattggtggcggctggagttggagacgttgtgctcattggttcatccaattcagcacgcacgtttcagatcaaagagtttctcatgcgtaacggacatccatacaactacatagaccttgaaagcgattcagaggtacaacaactattggataatttccatattttagccaacgacatacctgtcctgatctgccaaggtaagtttgtgctccgaaatcccaataaccagcaaatcgctaattgcttgggctttaatgaaataattaaccaaaccacagtgagagatctcgttatcattggtgccggtccctctgggttagctgcggcagtatatggggcgtctgaaggactagatgttttggtgatggaaactagctccccgggcggacaggctggttccagttcaagaatcgaaaattacttgggatttccaactggtatatcaggtcaggatcttgcaggtagggcctacacccaagcgcaaaagtttggtgcggagatactcatcaccaaagggttacgactctcctgtgatggcaaaccctacatagttgaaaatgaggatggatccaaaataccgacacgtacagtcataattgcaacgggggctgagtatagaaagctgcaattaaaaaacctgcaacgttttgaaggtatgggcgtttattatggagcaacctttttggaatcacagttatgtaaaggggaagaagtaattgttgttggcggaggaaactcggccggccaggctgccgtcttcttggctgagtcggcaaaatgtgtacacgttctcattagatctgccggcttggcagaaagcatgtcgcgctaccttatccgccggatcgaagataattccaagattgcattacatacgtacacggagatcataacactcgagggtgatattcacctcgaatctgtacagtggcaaaacagtataactaaggagatagagaagcatcaaattagtaatgtatttgttatggcaggcgctgctccaaacacttcatggcttgatggctgtattgctcttgactctaaaggctttatcaagaccggtactgatctgacaccagaatatctgaggactatagattggcccattgcccgtcagccatactcatttgaaaccagtttacctggaatttttgctgtgggtgatgtgcgtgctggtagtatcaagcgagttgcatcggcggtgggagaaggatcagttgcgatctcatttatccataaagtacttcaggaatgaaaataagttaagcaagcactaggatagagaattattttcttattcttcctatatgtgtaacatttttcacaaaaggtgggtcgaatatcatatcgttatgtcaaatagtaatatactaatcaattaaaattagaaatgaaccgagaaaaagaaaaggaggaagaggaacgacatgttagctggttagaactattttatgatttggtatatgctgctgcaattgctcaattaggtcaaagtctaaggcgtgatttatccatacaaggctttgttgaatatgtattactgtttataatcgtatgttgggcttggacaggggcagcattctatgccaagaggtttgatgtaaataatctcgttcataggatattagtcctcttgcagatagctcaagcagtacctataaccgtgaattccaatcatgcctttgataaaacttcatgggtttcataatatcttatgtagcaatcaggtcttctctaaaccagaataaataagaacagggaaaaaatgactatgaataaaagtttcaagattaaattaaataattaaaaaaacagttcttgctgaagagaccgcttaatctgaaatattagatattgttacaaaatcattcaaggattgatgattggtgatgtaatattggtcattggtcctatccatggcagaaactatccaactagctccttcactttcaatagtttaaatgacatgacaaaaaccatgaatattactgcagcagaaataagaaaagtagttggaccaattaaattatataataatccacccaagattagccctataatactggccagacttcccatgctgcttccgacaccttgaattactccctggtggacagttccagcacgctttgaaagtaaagacataaaagatggccacataagaccattaccgagtgcaaacagaactaacgccacataaactaatacggtgctattaaacatgaacagtgcaaaatttacacctaaaatgaaactcccaattacaactagtttttcctcagagaatttttgtagagcttttctaagtaccggaccttgtactagaatcattacgccactcaacacagaataaaatatacccatttctgttaccgtccattttagacctgatactgcatgtattggaaaggaggtgtaatagatgttaaatccaagaaagataaaaaaatacaatactaacaaaaaggatatatcttttaatctgaagacgtctaagaatgatagatttttaggatttggaatcttgtagcactcctttggttcacaagaaaagacttttctaattgattctttttctgaaatttcgaccaatgaggcggtggttgtcatcgctgtcgtcgttactttcgattcctttagcataaaggctattacaattaatgagattaaagaaataaagactgccgccaacactggtagtatctcttcataaatagtagagcctaaaatgcccgccaacgccggtccaacaataaaacccaaattagatgatattgccatcttgccaaaatttttacttctacttttatctgttgatatgtctgcaagataagcatttgcaacagaaatattgccgcccgttattccatctaatgcccttgctaaaaataatattattagaggaagtgtaataacaaaagttccgagaatgatcgaattaacactgtaaatattccagacaggtacaaaaagtgcaataagaaaaactacccaacctacgaatgtaccgccattacttatcagtaagaccttttttcttccgatagtatcagaccatcttcctaatagtggagctccaatgagttgaaacgcaggataaattgccgccaatatcccatacacaagagaattgcctccaaaatctataactaaaaataccaaaaaaggcaaaactatgctaaaacccatagttccaataaaattcgataataataatggaaaaattgaaacctgcttatttacaatggccattttgagtttaagacgataagaaagttgttgtacttaaggttatgatagaaccatgagaaattatcatatgtcttttgaataatcaatactttaccatcattgagcatatttcttatccaaaattaaatacataagcttgaaatccttttcctttaacatctattattaatgaatgaaagtcatcatcatatgattgatgatttactatgttgtacaacctagggtaatcaatcgcgaattgagaatcactttctgtatctacacctctggaataatttgataacaaggaataatcctcattaactattccttgacctttgcctcctgctaccaagtttacagactttgcagaatagagtaaaccaatgcggcctgagtcactttgtaattcaacattatcatgattgattttccattttccttcgagatatattgtattaggtttgattgatccattcaatgatggtattgtataggtcaccgtttgtccagcatgaactccttcggaatttcctattgctgaatttgacccttgatttccaaaatacaattctggtgttttaatttttgaaaattcaacaggctgtttaagaaaattattaatattattggtagaattaaattgagatttgttctcataggggaaggttgtatttagatcgatattttctatttctttgttaccatttctttcagctaagagtgattgaattaccttttctgtttgattgtactctccctcgcctattttgttatacactatatacccttgaggatcgacaatatacatcctgggccaataattattctcataggcattccaaattttatggtcattgtcttgtattactggatattttatgccgtatttttgtaatgaagtgtttacataatcaatatttttttcaaattcaaactctggtgtatgtactccaactattaccagtcctttatccgcatactttgtattccaatctataatatgcggaacggttcttagtacattaatacaactataagtccaaaaattgacaagtaccacttttccttttaaactagtcatagttagcggcttaccatcattgatattgatgatatctataccttcaccaggtttttcaaattcaggtgcaatttcatattgagatttattgcctgatactttcttttcgtcaatctgtggtattaatgtagcatactttggaaaaatttttccatccgagttagtacctgcattaacagggagtagaaatggggagtatgtcaaataactaataattaaagtacatactataatttcagttattaaaataatgatattttgtttaaattttaatcactttttcctcattcatttcatagtagtatttttttaaaggactttatcttgtttgttcttgtctcaatatagagatacttgctgttgacaaacatatttgttgatctaaatcctataaatattataaaaaaagtttgtataacaattaaacgtgttctactttctccataatttttcatgtataatgacccatttatctaatatttaagatagatgaattctgtaattaagaattattcgttagaccctgaatatggacttttttgataaaatgacttttgttttaagaaaatatgaaactcagccgggaaataatatcttaataaatgatacttcatatcaatacataaagaatggaattgtggtaaaaatccatactagagattagtatcaaacgccaagatcatccatcttatatatccaactaattatgaaattccattacctaaatacagaaactatacaaaattaacatgatgatcaggaactaaaaagaaagaattagattataaaaaccttttaaggacagaaatacagattcttattatgagtcttgagggcaactcacaaccgagtcaagaaatacttgatatatgcaatcagttacaagcgaactataatcctaaaaagacccattggactatggatgaattatataatagaatatttgacgatacaaggctaaaagaaggcaggctgagttctaaacatttcgtaaaggatatggattggataataaaacttggtttgatctcttttcatgacggtatggtgaaattggacgaatttactaaaaatagacttgtacaatattttgatgaacatacagacaccgtggaagactaaactttccaatacaagaggcaatagtcataatcttctaatctattctaatttgtattaaggataccatacaaagccatattgtagacacattgttttagatggtttatcaaaccgtaataacataacgcctacatcacggatattattactacaatcaacacaataaactttacaaacaagtctttctcttacccttttttcatcccacttactcatggcatatctatcgtcttcattcaaagcggaatacaggttcccgatagatgcaggatcttttttagaaacatagatcgaagaatgatcttatgcagaataaaagatatctttcttcatgacaaaccatggtaataacattatttgaagtttctcactagtttgacgttcctatcaatagtagaaaaggtacctctaatatcatactcaaacctcacttcatttgagatttttctgtttactgctttcaatttgggttgttaattctataatcccgtaaattttattgtaatcatacttattcaaaataaactcctgaatgcggttccacctacccgtttgatatctcttactttttagaaccctagtattaatctattcagataatgacatacattttctacaacgtcacattagccggaaaatgataaacaaaggacaagattattttgaagtttgaataacaaaaaatatgatacaatatgtaaaatctaataaaatcctattaaaaccaggtaaacgagatcatagtaccaaggcgatttcagaatttttcaaaaagcttcaaatacaagaaagtaaaatgaaaggatttataataatggatagtctagaagacccatctgaatccataatccttactttttgggaaactaaagaagagatgactaatttttatcagatagataatcaccttttatctgatttagttgaaaaacttaaacctatttttgaaacattgcctgaaagaagaggttataaggtatctgatcttcaaatttagttgccaagacaattcggaaatattttttgcttatgaaatatgtatagattttatagatacagtagtaagtcaaacatcaagtaataagattgttaattttgattttacctaatttagcagatatttatactatacttggaaaatactactatgactagggataaaagtcaccagagtattcttggaatacaccatatcacggctatagccggtaacccccaaaaaaatattgacttttacaccggttttttaggtttgcgacttgtaaaattaaccgttaactttgatgatccacaaacatatcatttctattatggagatgatataggaagaccaggtacaatcctgacatttttcccttggcagagcatgccaagaggttttaggggaacgggccaagtaattactacatcttttttgatacctgaaaattccatagaatattgggttaacagactaaaaagtcaaggggttagttataccggtccgaccaagaggttcgaagatgatactgaacaagttattacactttgtgatccagatggtatggaaatagaactcgttgcacataaggacgctgagactaaaaaagatcatgtttggagaaggggccccattccagaagaatatgcgactagaggattttattcagcaactctttccttggaaggatatgaacgaacagccgatgtcttaactgaaaacatgggtttctcaaaaactaagactgagggaagtagattccggtttgaaattaaagataaagaaaaaataatagataatttctatggtaacaagcaaaaaagagaacttgatcttttgaattctccatctactgtggatctcgtatgcctaccctatactcaacgaggttctatgggagtgggtactgtccatcatattgcatggcgaactccaactgatgaaagccagttagatatgcgaaaaataatagttaataccggtttggatgctacccctgtaattgatagaacatatttttattcagtatatttcagagaacctggcggtattctatttgaaatagcaactgatccgcctggttttatggtagaccaaaaagaggaggaactgggacaaaagctcttactacctgaatggttagaacctgatcgcaaatatcttgagaaagtgcttccaaaaattagtacaccatcacttgataaattttcttcttcatctaatcaaactagtaatactcagaaagtgaaagatgatgagtgaacctgattttaaataccgctttattccttccccatcacagcagcatgctgtagacaattctgatcaagcatatgcacccaaagatgatcaatcagaaactttgactttattgctgcttcatggtacaggtggaaatgaggaagatttgatacaagttggtcaaatgatatcaccttctgcatcattattaagtcctagaggaaaagtgttggaaaatggaatgcctcgattttttaagcgtctcggtgaaggtgtatttgatttggaggacttgaaatttaggaccagagaattggctgattttgttaaggaggtatcgagcttttacagttttgatttaaacaagataattgcagtaggcttttctaatggtgcaaatatagcagcaagtctccttctttcttatccaggaaccttaatgggtgtgatcctgtttagagcaatggttccttttatacctgattctccactcgatctatctgataaaaaggtactattatctgcaggagtgtttgatcctatagtatcagaaagacagacgcgaagcctctttgatattctagaaaaaagtagagcaaatgtaactttgaaatggcaacaatcaggtcataatcttacaaagtcagatatattagacgcaaaagaatggttgtctgaaaacattcattagtataaaccaaagtcaatttaaaaggaaacattggatgcatatttctctttacgtagtactttgtcaattagccgaccttaatcttgtaccgttaacgatataaatctgaccattgattttgaactttccagaatgaatattgttaactgatggttccggacgagtatgatttattgtcctaaaaatattttctactaataatgatcatctaaaattctacaattaaattataaagctacgaaactgtctttattattagatgaatcacttatcttctacatgtttttaaataactatgatattttaaaaacggggaagatttaacgatgagcataaccggtattcaggaagttgattttttaataaatattggcttgtcattaattgccggtgtattaattggtgcagatagagaattgaaggggaaagcctctggaataggaacacattgttttgttattggtggttcaatgatatttacttatctttctgcattagttgatccaaattctacaacaaggattgctgcccaaatcgtaacaggaattgggtttcttggagcagggataatactaaaggatgagatttttgataaaaaggatacggttgattctagtcatactaaagtattgaacttgactaccgcagcaagcatatggttttctggtgcaatcggaatggcaatagggtttaacttttattttgtagcaatagtttcaatagcttttgccgtaggcgtccctcatattcctaaaatcagacgacaaaattaacatgttcaaatatggtacccatgtgatgttgactagataccaatagtcgtgactgatactatgaggaactataaatattatcaatcagaatttaggtaatgatcagatgattatatatcgaatgaattgatactttctataaacaattcagaaattgtacctatattattatttaagcagaaatagccttggttacatctacagtaggaaagcaatggtagagaatttaacaataactatggatgacagtagtgagaataagatacaacatgcaatgacataaggtaacaaggtaatacaatcttgatgaataataacaacattacatctgtatcccgtagcacctataattgaaaaagataataaattaacgaaaattaatcaatatatggttgcagataggagtgaaattcaattcattttctaattacgtattgtaacatttaatcaatgagttctttttgataaatattatacacgtttatctttactggaaatagattaatttacctctaaacattcagataaatcaaatgctaaggtccacagaaatgcgttggttttttgaaggtaagatacccattagtgtaactaaaattttggaagaaactggtttggatatttctgaaaacagaactgatcattatttactagtgcaaacttgtgacaatattggcataaaagtaagaaattctagactggagattaagtggcgtcaagatgtacagcctcatgacatatccgaattgaatattagtggcaatattgaacggtgggaaagttgggagtggaatgataaaacagcgtgcatagaaattgagcaatcaatctatagggatgatgaaaatccatggataaaggtagacaagaaacgatggcaaaagaaatttagtgttgttgataaagtcttgctccctgttccttctcaatcactgtactctgatcttgctatggagattaccgaattgaaatcaaatggcaaatcgtggtggaccattggctttgacctgtttaccgaacaggatcattctttttttgaccaacttattgaaatctttcctgtgctacaaattgaagtagatttgaaaaaagagtggtcatatggatatcctcgatggttatctcaggttgtcatgtataataatcaacaaaatatataattcataacaaatacataacccagccagcacagaataaattactcttttaaagtttcataattataaaagaatacgaaaggtagatgtgatgaatgtggtattgaaaatgtagaagtaatgagtataaaaaagaacaacaaagatgaaaaaaccacttggaatagtcaaacagtttactctagatgtttccacaaataattggcaatactttgatcattggtatttgaagttcatgatggaaaaatttgatattagctttgatatactatttttgtattcaaagataaaagttaggttacatcaagaaattttaatgttaaaaataatgagagattatgttaccaccactttacctccacttactaattctaaaacatccaaatgcaatatgaaataaaggcgagagatgaattattactatagctataccggttgtacttctattccctcattttcatttagaatttttagtgttactgctttggcacttgcaaagcttgcatctgctagcattccctcttgtccaacccaatcaccaataatgtatagattattgactcctggaacttttatatcgggtcttttttccataactcctttactattagtgagaactgtattagaagctatcatatttggcagaaagcgatgccttactaccatttttctccaaccgggctgaaccgtatctaggcgtccctccaactccattctatttcgaactggatttggttcggtagaatagtccaaatacttcatggcatgaaatagaatcccatttccatcagccgacaatttagcaaaggcagaatgtaacgatagatacaaaggggcatccaacccatatgcaccataaacattgggatcgggaagcctacttaatactagatctaaggtcgctacctttgcgggtctattcattttttcaagttgattaagaaaagaggttttgattaaggtgttttctttcaacagactatgcacatgagaaggattggttgcaataatcacctcttgatatgaaaatgccgcattatcagacaatccaattttccacaatggttgtttattttgtccattagtttcatgattctgctcgatagaaaccacactcttgccatatacaaacactgttccattcctttttgcaatatcaaatatctgatttactagggtttgccaccctcatctatataaataacacctcccgcaacagctttttttatttgatctaatgccaacttggcactcacgttttctgcattaaaagtatatgttgcaatccttcctagcatttttacaaaatctttggagtcagaatttttaaaattctggtctaaccagtcttggaaacttatctgatgcagtctatcaagattcattttgttcaactttataaaaaatcttatagtctcaatcttactacctaaaccctttagtaatttggtcgttaaaagttggtttaactttacaagggattgattcttttttcctttttttattataaaatatttggagtagtcaactttgttacctttatattttacatttaattcctctaaaatcttaaatccaattccatcagcatacaaagcatgagctccttgattaaagtaaaatccatccatgactgtagttctagctctaccaccaaattcactagatttttctataatagtaacatttttcccatttcgaactagaaatacagcggcagtaagaccggctaaaccgcctcctaatattgctatctcgcctgtcttgtttttcgattcatcccttgttactttcataaattggttagtcatccaacttactaattaacaaacaagtttattaatgtttggttggctgtccgactagatttatattaatcgatcatttatttactattagattgagtgaaagcaaagagcaaaagataaatgaaattttgaagaattcacttacggttcttgctaaaaatggatatgaaaatacaacaatagcaaacatagctaaggaatcgggcgtaagtagaggtatattgcattactatttttcggataaggaagatttagttagcaaagtcttggcatatagctctgaaaatattattcaagccaccattagaggtattagaggaaaaaccgcagaagaactagcggataatatcatcaaggacagtattgtaagctttaaggaaaatcctgacttttatgcatttttatttgaaatgtggtgtgcatcacggagaagcaataagatcaaaaatgagttaattatttgcagtgctaaagtaataaaatcaattaaaaaagtattggatgaatcaattgaaaatggacgtttaaaaattagtacaagaaataccgaggaaatgtcaaaagtacttttggctctgtttaatgggattgcctttgaaatgttgatggaccctggtcgaaatctagaggataggaagtattggatacaggttaggtatacaatattgtcaatcctaaaatcacaataaattatatgattgaatgaatacttgaacatcgtgattactaggaacttgatcccgacggatgagaactgttatcgaaaaacaacacttgtccatcaaatttagaaaactaatataaatgatagtgataagaaataatctgctgttccaattctacaattccccattaacttcagaaggcgttcaaatttttaagaataaagcgttaagacgttgatggtctttttatctacccgtctattaatgctaatgctagattatatgattttgttggttcatcaacaatttttggttaggtattatattatttgatctactatagaggttatgcctgaacaacagaaaatagatgagacaatagagactacaaagagcctaaataagaaaaaattatcaaagattgaacaatcatctacatctttggaaaatcaacaaaattctacttcagaagtaagctcagaagatattgataataataccactagtactttagaaactcaagatgacgaattaaaaacgtaatcaaataataattatttgaataatcaaatcggggtatagaatagacagggtacaaaatattattacatttctttgctactttgattaatgagaactgttgctgacaaatgttcttaacccgtcataactcgatagatagatagatgattatgattgtccatgatatagaagtaaaggaattaccaaatttatcatttcttgtgatgaaaagtcgttataattacaaccacatagtatcactaaactaatttgtttgccggggttaaaccctattatacttgaaaatccatctatcgatccagtatgccaaataacttctttcccaaaatccgttgttatagtccagcctaaacctatgtagtctttaagagatttattttcagaagactgaccaaatgcgtgtcttattgaatgagtttcttgtatggaatcattaattttagtttgtattagccctatatttgctgatagatactttagcaaatcattggtcgaagagtacatagcgccagctgactgaattgtttctggtatgaattccaagttaacttcttttcctgatatatgacctgtagcatatctagatttgatatcctcaggaaccaaaattcctgtagtattcatacgcatacctgtactatccatcgcaagaacatttagaattttatcatttacaagttgatcaaatgaaacaccggccctcagagataaaatatggcctaaaagacccatcccaatgtcagaatagtttgcttttgtgcctggcttgtttgacaaagttgtatttgatacaaagtcatagacttgctgggtggtataactgtggtttctaatccaacccgttggaaaatcaggtaggcccgaagtatgggttgctaagtcctcaagtgttatcttgtgtccattatacaatgggaccgtcacattatctacggggagatacttttctatagaatcatttaggttgaccaatccttgatttaccatatctgccaaaataattgccacaaaagtttttgatatgaatgctatatcaaacactgtatttccatcaaccttttgtggagttaaagtttgatatgtttccatatcctgcaacctgagtgccttctggagataagataccaacaacaattggtactgaaatacttgaattagaaacagcactattgttatacgaggaagaattactggatgatgcatgatcgaatactatctccttaaactgttccaaaagtgtatttgatatgccattttcagcataactatgggaattattcaatagagggatttgatgatgttgagcatgggccaactgaaattgattctgaaaaatgttagaagaggcaaaaaaagataagataaccaaagtcgacaaaaacgcacataaacaaaatttcctgtaaatcaaatatctttaacatttcatttcacatatataaaaattcatgatctcataaggatatatttagtatccttcacaatgagaaattgtgaacttgcataaattgtattagaacctgattataattatccattcttcttgtttcgtactgttatttcaaaagattgaatttgaattagttgatacaatttaatgaataaacatctactagagtataaggattcgagagtaaacggttggagaacgttataaatgtcagcaaatgaggataattattatgagagctcttgttttccaaggtggaggcgcactgggcgcttacgaagcgggcacttaccaacaaatctataaaaaagcaaggaaggagagtttggacggaagtctgtttgatattgtagcggggacttcaataggtgccataaactccagtgttttgatgggtcattatttaaaaaataacagttgggagggttctgatgagactcttttagaattctgggatggtcttatgtgttcatcaatagcagacagtctatttcacaaaaattcaatcgttcgttactcatgggattatatgaagatattcaatcaggatttggcagatacagaaaatgcaaggagattttggtccatttttgaatttgcttttactccacgtggtgttccaaatatgtttaaatctgttccccatgttggttcaaaattcttaaacccttttacagatttcttaccatggtggaaatatgattttacaccattaaagaattatttatgcaagtttgtagactttcccataaagactcgactagaagaaggacaaccaaggctcttactcacaagtgttgatattcaagactttagctcgactgtagtgtttgatagttatgagaaattacatgatgcacctatcaaaaataatagacttgaagacaaaagcttggataagataacgaataatggtaacaccaatttagaaaaagaagataatagtaagaatattaaaaaagggagatggtattctgaatatggaaactctgacaatagacacttgattttctacgatgggataggagtagatcaggtgttggcaagtgctttgggtaaatacgctatgaatcatcctcatattgaggattttactactgggacattccgccaactttgggatggggttatcttagtaatactccattaagggaactcttaacagcgcataaaaattattggatagaatatctacgaattgatcagaataagaaagagaatgaaaattgtactgaattgatagcccgcacacctgagcttgaggtgtttatagtcaacttgcatcctcttacaccaaaagttatccctacagacaaggacctggttgatgatagagaaactgatatcttttttcacgatagaacttcatacgatgagcaggtagcatatgcatttaccgactttgtcaacatgactagagatctaatagatcttgcaagatccaaaggtctttctaacgaaataaatgagatcctaaataaaaaagctaaaacaataggaaggatagatgagtacaagtttataactaatagagatctctttttaggaaaacctagaatatctagagtatggagaattgatagactagaaacacctgaagcaacatttggcaaagttactgactttactccggatagtgtcagaaaattgatacgagcgggccaatttgatgctaggatctcaattgacagaatggaattaatttttggaatagaagaattaatttcagaaggaattatgtctatggaagaaggcgatgaaatcattaaggaggttagagaagttattacaaccgagaaactattgtataaaatgaaaaaggaggaggtattagatgcatacactgaataccaagagaagataaactctaagaatttaccaatggcgtgtaaagagatattgttaaatcctggaagagatattgttaaattagtttatgagacaaataatacgccatagtatagcatgatcatagaaatgtaaatttcatgaaatcattcttctttgatggttttatgtaatgttgttatgaatgcatttttttgacaatacaatcaacagatctagtaaaaaatcttacctatatgtgttttttaggacttttccaaatatcatcaatagtaaaagaactgtgatatttgtcttttccttatacattacgacaattctagagacaatggataaaagatatctaaacaatgtttagaacatgccatttagagaattgagtatcaaaataggacagaaagatgttcatacaaatgatgaacgatttcaacttgatgggatacgaattggtattcttgggagagatgatattaaatgtgattatcaattagcaatgacaataatagtcaacgaatctccatatactattaccatagaacctgaaggaatggcttctgaaactttgaccttattcatgcatgatttagtaagtagatataatctaactatttgggaggttattgacactgaccgggaaggacattttccttctccaaagaatctcatattccgattaaaatatacccgatatacataatcaaaagtaaaaaaataaaccggatctttgtagaactcaaaccttcaggttaaaacgatcaaatgagaaaagtaattctgaaaaagaaatattatgtcatggaaaaactctgatttcgaaagtttcctcatctatccttctactttctgttagactttaattttaggataaaatcaatgatgatatttattagaaggtactactattttcggttttgttgacatggatgacaggagtgccacgcaagttaggtccataacctgtaataaccgtttgaaatgttctcacgcgatcagttcatctctagtataattctaggtaggtgcctgatcaagattagtgcatagaatctagatgctactaagattaacgtaataatgactaatcaattatttaagttgattcaattattcattcaaaatactaatatccggattctttaaagcaatataatccggatatttctgatcaaaatctatatgaattacttacacacgttttatagatgactgattttttagttcattgaatgcgattaaaaataaaggtcatagacgaaagtgacacattaaccgaatcctttaaaatcgaatttatcattgtagggtaggttctgagatatatgagatgtatggaatgattacctcttctgcccttgtgtcagtcatcatgttaatctcctgttccacagtctactgacgataaatagcaacccgattattatgattagagacatctctaattgtattagctttaacaaatttaattctccaaaaatttggatcaaaactatgcccattatatttccgccgataagcgcgagaaagagaatcttgataatatctctttttttcatgtcgatatttccatcttgtttttattcagtctttcattgcttttcttaatacctaattaaaatcatcggttgtgttctctattaccaatcactatgttagtatttccaatgtataactatttattttctgatcttgaatatgttagcatatttttagattaaaaaacgattgattcttgactacaaaagaaaaaattgaaaattgaaaatttcgaaagtgcgtttgagttttagtttatggtgttattttactattgtttacatctgtagaattgtcagtttccatttccatggtcatattgtccatttgatccatcgacattgacttattgtccatttccatggtcatgttttcttgagccataacgaatgagttttgtaatcctccagtagataatatagatccaaccacaaatgcactaataattgcaaacactaagtatttgtccatcatgaaccattaaaaaattcaacttataactatttcttatagtaacttagtatgttccatatagtataccttatacatatagtaaattgattaataagggttttttaaataaataagaagaaagtttttcactaattttaatataaagtatctcgatattgataattttattattggtaacattctctacaacttccgcaattgctcaacaagtagtaatcaatagggctgcagcctacttctcatttcccttaattgatgcatggagaacagagtatcaaaaactagtcccagaaacaaacataaattatccttcaatgagaagcggaggtggaaattgtatcggatcattttgtatttccatgattatcaaaattaaaatttagaaaaatcgtatttcatttagatactttagtataaagataaaagacaaaatttgttaagtaagataagcctcggctttaccatagttgctctacttgaccatgggataggattgagggtttgctatgacctctacctaagatcctcataacctatcctttttcatcatttagtaaggtagattttcgaagaccagaattcaattattgattcatattatgtatgtaattgtatctacatattttcagtctctgttctaatatcgatacatcaggaaacatggtctcattgttgctaaattcataaattcccactacgtatgtatgacatgttggacaatattgatagtataacttgtgccataatcgtgtattaatattataagttggttcgcaacttagaaattgaggaacaaactctacttcacaattaaagcattgcacaaagatacaattaccttagggttaataaaccgtatcatggtattggtaaactctgaagatcttatatttcatttagattatttagaataatgataatagtctgtatgtatttatccacatggatagttctctctctctctgcggcattattacactttggataaggattggtactgggagaccaattggtctaaccctagcccgtccaaactatttttatgttgtgataagaactaagtaaatattataaaattaattatatatttccaatatcctatcttatgttataatttcaagaaatagagggacaaaccaataatataacttatcaatagtattcgtatcttttgttcgtaagattattctgctccctaattacactagtttattatatcaattaatacacatttgacgggtctctgacccagcttactaataatactgttacttagaaatattatggccatagtaagagaataaatgaaatcaattttgactattatatatgtgaccatgaaccgtacataaaatccttggctgatcaaaacctcaaatctcggaaatctactcgtcgagttgtccaattgttagagattccaataggaatcgtcataactattatattagattgacatctatcgacattctggttatctatattgatatagaccatggccagtagaagtcgcacagaactatataaacctgtatggattgttttcatacaaaagaagatcatctatactatgaaagccaggataataaacacccatgcatgaaacttggatgtaattgtaatcagtacaattataatcttaaataatatttgatgattttcaatccatctatttcttgactaaaaaataaattctacgtaaaagatcgatataattaatgtactactttaagttaaaacttagctattgtggtcaatttgtattgcctcaactcctagttattgtacttgcctatattttcaaatgaatgaattactgtcctaatattgatatctgaggggtcttttagagctgttttgcaactttgcttccccgagaaccggtagtccaggtaaatagaatcttttcactcatgtacaaatcgttgtcaagaattatttatttttggcgataatatattgtggaaaatgtaaacattttatagcaaatgagtaatcactatcacccagtagataaaaaatgacggtggatatcgtgcaatctttaattttgggaatcgtgcaaggagtaactgagtggttgccaatatctagctcaggacatcttgcactaacccaattattactaaatattcatgtgcctgttttctttgatttgattcttcatataggaactctagcaggtctcatagggttttatcgaactgatttgttaatgattctccggtctgttttctattctcgctccatgtctttgcaagctgtcaaagaatatagaaaactattaatgcttataataattggaaccattccaactgcaattatcgcatttgcactaaagtccttcttcgaattttcattttatgatttctttctgttatctataggatttctgataagcggtatattcatttatatcactaaatatttcaagaaaggttccagagatatcagtaagattgatgctgttttgatcggaatagctcaggggttctctgtattctcaagcatttctcgaagcggtattacaatttctttaggaatgataagacaaattgatcatactcaattggtccggttttcattcctgttatctattccagccattgtaggtggatctgtatttgattttgttctaatggatacagcacaactatctgcgataggggaaatccccttttcttcttatatagttggatttttatcatccgcaataattgggtatttaacaatcaaactgttaataaatatcataaacagaggaaagctttactatttcgcatattactgtttaggactagccgcaatattattaatatattcattcatgatagcttgaaattcacctgatgactttcaagaatattataatattttgaggtacaatatgacctttaataagggatcattcatattcaagtctgtattgaatttttcatcaacaataatccttgggtcacattaatatcgaatggtagtcttctagaagaaaaaaaccgtgaatttcactccgcctttgatttgatcaagacaaattatactttatagaggggttgccttttgaaccgatttcatttagatactatagtataaaaataaaaacagatttgcagaataggtgatctctggttcaaccggctcagaccacctccagtattaggatgggatatagagtgattgttatctcaatctgtccacactctatttactatcctatttctaatctatgatttctatcagatgatatgtcttatattcgattattccatattattcaatgaatcttgttattatttctattgaggttatttaataataaaataccaaattcatcatagtgatgtggtaacaatattaaaaagtagtatctggcaatattttatgtaatatagatgcaatttttttactactccatcgacacggggctaagaacaaaaccgaaaggtcatgcgtgtatatgtgtgcaattgctgacctgatttaggaataacaacctacatataagaaaacaagttttcggtgttaatatttcatttagataatataggatatggatatatcctattccttgtatactcatcttactcaaactacgcgatgatcttgtggaaataggataggacctcatctcgcaaacaggtcgtcagactatcctatttccatttcgatttaatttatattttcaataagatgaatactaaaataaaaaaagaatcatgaactcgaatactataattcatgatattgatattctaatagtgttaatagatccgaacaagtaacgaaactataaaaaatgttttaggagaaataagaattatgggggataagtgacctcattgttaaacgttattacattttgaaaaccaatcaatagtttgtgtcgtatgaaagctatcttatactaactgaagaaaataacttgttatgtgaaatgagagaaaatgattgtagtatactctatcgaaaactgattattgatattatggttgtaaatccaaaccgttttaaaccaggccaagaatgaaatctccaacttattgatcaaaatcaataagtcacataatcaattattgatgtttttgaaaaattattctcaatatatttggatcattagtttacaatatcgatattttctttactccttggaagtggaccattaatgttgaatatcgattcatatatccatgagaccttcacaggctacatgatattacaatagcccttacaatatcaaacttttagaatttaggttgcagaagaatcgtttttagcattaaatcatcgatccatatactatagtgaacatttagataaataattaatatattatagaataagatcggatatggaagaaagacaatttctccatagattgtgcactactgcacttcatgttgatgtttctatacaatttgccggcattattgactctaatggaaaattgctagtagggaaatcaagaaatatccttcataatccccatttctcaaaaaggaaaattactcgttattcctttaaaaattccaaccattatgataacccaccttttaaagacaaaaccttgtcatcaaataatataaaaagtatagtatctctccaatccaatttgattaatgaagatgcagaattcagactaattaatctatacgaagatgtttttttggcttatatcccaataaatgaactaaacgatcgcttcctctatatctattttagaactgatgaatatttagaagatgttctcttaaaactcgatactactttttcataaaaatgcaattgtcatattaaattacaaatacgaaaatatgaaatatgaactatgttattatcatatacaacatataaaatgcgtcactttgtagagttattgccttgatcgattttacaaaatgcaaaaaaagtaggaagagtcaagttactaactagtagtattttttacatgagggaaataatacccatatctattttcttttctgataagttctagaatttttccggctctgttgcttgttctcctcaaataatcaaatactagagtacaggatattttttctataattcttattattgaattgtagactcgtttgataatctcgtccttcacttttgaccttttgttgagttgttctattgtagattttgaatcgcttctaataactattatttttctttttcctcttttttttagcttggtcttaaatattttgagattatctgaaattgcaaaatatattgctagcatttccattctctgaacgccatatctttcgttcttcttgtaaggttttagtgttcttattttgcttttgttttgaaaatggttatgccaggaaatgtatcccgatggtgatccgtctacatcaattgcgatttgtatcttgcgcaatctactttactataatccatgtcatgatataatcattatctatatagttactataaaatgtatgaactttctatcgatcttcgaggtgattgttgatcgatgatgatcatgaattgtactgaaatagggataacactgacgagaatcgatatttattaagctctgctatcgtttttgataaacaatgaacaaatgaacaatgtatgatgaacaatttatggcgtgtcaaagttgaagtagaaaatagtgacccttcgacgacatgggggaatggtcagtgtgattgcagaaggaaaaagataatttgatttttaatgcagtcaaacttaagacttgttatagttttctatatagagatagttctttaatattcacaaaagctgttattggatagtctgtttcttgttttcaaaacacgatctcttggatggttggcagtaataagatcagaaaaacttgttttacttagaaattatttatgggtgttaatgttatgatgacctttatatcaagagcgatgatattttataatataacgtcttacaaatattttttttatactacattaatctattctatatagtgtatgaataatatatagacaattgattaataattatataattatacaaacttgatgagtaaattaatcaactataggatattaggtttatcacttttagccgtatcactattagtcccagtttatgtgaattcagtacatgcacaaaaaggttctattaatggagctggagcaacctttccatatcctttaatagatacttggagagtagagtatcaaaaagtaaatcccgatgttaatcttaattatgcttctattggtagtggtggagggattaaacagttcactgaaaaaacagttgactttggtgcttctgatgcccctctttcggaaaccgaattccaaaaagcaggaagtgctgttcacattccagaaaccctaggttctgttgtacttgcatataatattccagaggtaactacacctatcaatcttacaggtcccgttattgcagacatgtttttaggaaaaatcactaaatgggatgatccaaagataaaagaactcaatccgggtgttactttgccctctgaaaacatagttacagtccatcgttctgatggttctggtacgacatttgtatttactgattatttatcaaaagtaagtcctgaatggaatcaaactgttggtaagggcaaatcggtgcaatggccatctggtataggcgcaccaggaaatgaaggtgtggccgcatcaattcaaggaacaccttataccattggatatgtcgaattagcatatgccttaacgacacagatgaactatgcatcagtacaaaaccaagagggtaacttcataactccatcagttaattctaccgcagcagcagtaagcgcagaagcatctacgttgcctagtggttctgaatcttggtctaatgtaacaataacagatccatcaggacctgattcatacccaatatctagcttctcctatcttttgctctataaagacttgagcactaatccaacgatagatgaacaaaaagcaaaagcaatagctgaatttgtggagtgggccataacggacggacaacagttcgcagaaccattgggatatgttcaattacctcaatctgtcgttgatgtcaatgaagcaacattgaaatcattgacttttaatggaaacccaatactcaccaactaatttttatttttttctatatagaatatatcttctatattgattatatatgtaaaatatattattcaatagttttactttactgatatactttgcctccaaaagattctaaaaatacgcatgccgagctagtaaagaaactagatttacaatcgcgaaaatcgtttattggagataaatttttcaaaggattggtaattggggcatctgtctatactctgtttatggttgcccttgtattttttgctttagctgacggctctgtacctatatttcttaaagaaggcattaactttgtaataggaactgattggaatgctgttgaggggcgagagtcctttggagccttgccttatataataggaacgcttgttagctcaacaattgcaatggctattgcggttcctatcagcataggaatagccatatttattacagaaatgatgaaaaacaaactgggaaccattttatcatttatagttgagctcttagcagctgtccccagtattatttatggtttgtggggattatttgtattcagattctggattagagactacatagaggaacctcttcataacacactaggagatttttctctttttgcccaagctccttttggtttggatgtttttacggccggaataattcttgcgataatgattattcctatcattacagccgtatcgagagaggtcattaaggctattcctcattcacagaaagaagccgcgtacgcactaggtgcaacacgatgggaaatggtcaaaactgctattctaccctcttcaaaaactggtttgatgggagcaacatttttgggattgggaagagctattggagaaaccatgctagttacactggttataggaaatgcaattggtttggctgctattccgacatctttgttttctcaaagtcaaactctttccagtattattgccaatgaatttaatgaagcatcaaacgatcttcatctttcagcattaattggtttggggttggtactttttgtaattactattttcataaatgttgctgctatctatataatttcaaaagtttccaaatcctattctaacttgagggaatagtatgatcaaagaaaacaaaactaaagattataaatcaatcattcaggaacgtattgcgaaaaattcctttaagagaaaagtctttaataattttatgaccgttttgttatttgtttttgtaataattgcgatcatacctttagcctctattttgtttgaagtgtttaagaatggtgttggagctctaagttttgagtttctattcagtcctccgggtgcattcggttcaggcgatgggggtattggtccagccatccaaggaactttgatagctgtaggacttgcctctttaattggagcccctgttggagttctggcaggggtgtacctttccgagtattctagctccagcagatcatttgcatatttccttagactctttaatgatgtgttgactggtattccgtctatcgtgataggaattacgggatatatcgcgcttgtactaactcttggctcattttcaatcttggcaggagcctttgttttatccataataatgattcctattgttgcaagggtctctgaggaaacattgaaactagtgccaaacactctaagggaggcagcatatggtctaggccttccaaagtggaaggtggtatggcatattgtgataaagggatccaaaagcggtatattaacaggcatcgtacttgccgtatctagagtcgctggtgaaacggcaccattaataatgactattttaggaaccagcctatttttcagcggctttaactccccagttgacgcattacctttgagaatttggagattggcttcacaaccatatccatcagctcatgaacagggttggggtgctgcattggtgcttatattgcttatattggccttaagcgttgccttgaggatgtttgctcaaaaaaggagtgtgtttaaatcgaatacatgataattcctctaccttatctatataatactatatatttcatatagaaaacaaatattatgattttttggtttagtaaagatatctcgtgggtaacttggacaactccttaaagtcttctattaaagatgaaattgatgctatttcagagtacactaaaaccaaggccgaaactgatactactactaccaccactactactactgaagatggaatttcaccttccgatagagccaaaactgagcacaaatttaattcagactttaaaatagagaatcctaaactatcaatccaatctctgaaagcctggtttagtggcaaactagctttaaagggtattaatcttgatgttaaagaaaactgtgtcaccgcattaatcggtccatctggatgtggtaaaacaaccctgttaagatgcattaataggatgcatgatttaaccccaaacgcaacagctaatggcaaaattattttagacgatttaaatatttatgataaacaatcagatcctgtccttataaagcgacgaatgggaatggtatttcaaaaaccaaatccatttcctactatgagtatatatgataatgtagcagctggcttgaaactcaatggcattaaggataaaaatttgataaaggatatagttcacgatagtttgaagggagcagcattatgggaagaagtaaaaaatgatcttgataaaccaggaataagtttgtccggtggccaacaacaaaggctttgtattgccagagcccttgcgatgcaacctgaaattctcttgatggatgaacctacttctgccttggatcctattgcatcttcaaaaattgaagagttgatgaatgatcttaagaagaatttgactgtgataattgtaactcataatatgcaacaagcggcccgggtttctgattatactgcatttatgtatttaggagagttaatcgaattcggtccaaccgatcaaatatttaagtatccgaagaaagaattaactgaaagatatatttccggcaaattcggataggcttatttaataagtttttgacgtattaatcaaagtggtacgcttacttgatttggggctaactaaggttaacagcattatttttgatatggctggtttagctgaaaatacagtgtccaaggctattacatcctataaggatgatgatacttccactaaaaatcaaatatttgaatcgtctgcaaaattgaggtttctgcaggatgaagtatcggaattatgtatagaactaatcgctagattccagcctgtggcaacagacttgagatacataaaatcttgcatggagctatcttacgttttttcaagattcggtagatatgcttttgatattattacagtattagaaattcttggaccgttagaattgtgcgacaagtcttcagtaatgcgcatgtcaaaacttgttttagagatgatggatcttggaatatctgcattacgattacgggataattctattttagccaaaatttatgaaatggaggaaatggttgatgtgttatacaaaaaaagtacgcgtgaatcatctcaaattgtcaccacaaataattattcagataaccgatgcaatatctccactgctttgattctaaaatatttggaacgcatttctgatcatgcatgctatattgcagattcagttaattatatcgaaactggtatggctagtccaagaagatagatagctttgcttttattatgactttttctatcaaacgtcttcttgtaatcatattcacatcgaacttatatcatgttttttcaatgaagaaacataaatcacatcgtattacgtcatccgcataaattcaacccttggattttctcatcgtcaatttaattattatcaaataaatttaactatcttgatgaattggatatattgaataggtttgaataaaaacaataagaaatgcataatctgtggatgctctggtcattctcttttcggctgtttttctcattggacgggtcataaggaaaataacggtatctgtaataaaccataatcgctagtctcttactttaattcataaagtgctatcaccaattttaacaaaattttttcgttagttgtctctgctaatggtacaaaatatttctgagtttcctccttagttcttgctattttgtccttccttcttgaatttttcaaagatcgaagttcatctagtcgttcagccaagataatgttttttatcatgttgtctgattgctttatcttgccgaactgtttttctatttttaattcttcatttttattggattctaaattgatatatttgttaaaaaacgatactgttgtaaatgttttttcgctaatttccttttttatatagtctttcgtctctttggatacttcttgtttattgaaaatatcatggagtagtgcggaacaaactagatctgaactatttgagttcatttcttcgtttagaattaatgctactcttagtgaatgatttatttgaggttcaattttatcatattgatattttctcgtcatgctactgtagatcctcagtgctaatccgaaggctttcgaaattttttctacttcgttcattgaatcctcaaatggttttaataatttggtaaatcctattttaatgaaattatttttattatcattatccttagacatttctagtaatttgacctaagacctttggcatttcatccattaatgtacttttcatctacttcctaaactactttgataaaagttcataacaagggtaatagatatacattcataagtttataacattttatcagcttattgaatatatttacatggtttacgatgatccaaacaagaataatattgtaaatatctcaattcaatataacgatataaaggtgcaatttagtggggagcctgagaatgttcttctgtctactatttcttttcttaccaaaaatattccggagatacgcttggctcagaaaatttcattaaattactctgtgtccgaattaatcgagaagtattcatctataatcaaaattacccccgaggggcccaaaatattacccaaccttggagagattcataataagaaattttccgataaggaaatagtcatgctatttttgttagggtcaaaaatagcattcgaattggaccagatttcggaaaaatcatctcctatctccgaaatccaatctactacaaacctaaatccaaaatctattagttcaagattgtcagaattagttaaagttggatatgttgtaaaaagtgtaagtaaggaaaatcaatcagaatcagtagtgtatgggattaccactataggaattaaatggttgaatgatattatggcaaaaaaattactctaaaatagttacttttcaaacaatggttttttctgaatatatctgtagttccttagagttcctacacgagttaatatcccttctcttaccatgtcacttaaagaatgtgatactgctgttttatcgtaattatatccaattcttgacaactcttggtgaacctctataagtagtctctcactttcaaaaaatttttcataaaagatcttttccatcaaacttctacacgtatttccattctttgcaagctcctttaatgaaacattgtttcttctttgattcatattttgcaaattactgtctccatcaatttttgattttaataaatcaatttcagtctttaatttttcaatttcactattggtatttgtacttgagagcgaggcgatatctattccggtaaggacattctccactacattcttaactttatcttctacgcatgtaatttcgacttcccactctttatatttcaattttatctttgtctccagagatagtttcgataccgcttcactcatgcttaatatttgtatatcttcctgtctgataaaggtgttgttgaacaacatgcgcatcatgaacaacatttattagcatcttgttgttgttgaacaacatgcacaatcaattaaatctccatgatctggaatcaaatatagagaatatgaaaaaatctttaattaacaactttagtaattcctacttttgtaaggactatagaaatttaattgaaaataaaaagctggttttcgtagacgatgacgagggtgtacccatacaaaattggggaattcattcagaaaggtatgctaaccagaaaataaatgaaatcgaattagtgcaaaaggaaaagttagtttttggtattgattctagctgtattaaggttgcagaagtagaagatggtggattatatgctgtaaagggatccatatgtatatcttttaggggcaaacctgctgctcacttaagaataggccctttaattttttatcttaacgaagaagctcttcagaatcttcgacttgagcataatgtatccaaactaatactctttaatgatgattatgcaaaaaaattcttgagagtaaatatagaaaggtatattcagttttggttatcaaaattggtttcaaactctatagtactcattgatggttcattgaaatcttcaatatttgagaatcaattttatgatatttcaaaaaccatagaaaattctgttatcaataaaaattcattaattggaataagtaaaaactccaaaataaagatattaaagtatttgtcatatcctttgataagatctaaagtttgttcctttgttgatataaacctagttattcgaagcttgatatctaggatacatggagaacatcttctagtaaagttatctaacagtcaatactcaaacatactaagggccgatgtagtatcatataataatgatgtgaatagtactttaggaactttactatataacgaattaattcattttggttatccaagcactctccaactttcacattatgtctctgttttttcaaatacggacttggcaagtataaagagtttcataaagtctaattattctgttagagaaatctctcatgagaatgctagatcatccgttttagggactgcctggagatgaaaattctatcaaaaacaggtgatgaaattctcttactcgcggtaacaaatgattttgcaaataagggtgactacttcgttattgaagattttaacaataataagaaactactagttcaattctatgacgaagagtatttttcatcatcgtcccttgtagaggagataattaaagatgaggtgatttctaaatttagtgctgaaaatatttttgatcctttggagattaccaatctatctcaaacaatacgggatgtcaggatctttaagactaaaataagggcttctattgacaatgacaatcaaatatcaaccgatgtagactgggtaccatcaagagtaaactccaagattgtcaaaattggtctaaacgagataaaggctttattaaagaaaaacatgcgatatccaatttccttaggtagatgcggatctgataatcaaaaatttgaaatttttgctgaagatctagatggtaagttaaatataatcacgggcaagaaagaaaccggtaaatctcatctttcaaaaatactgatcaactctctcatacagtatggagcctatgtaatggtatttgacttaaataatgagtatagtgggctatcctctaatgttgatggtacgccctcatctatcagtgataagcttcttttgttaaatcctggaagagaattgaaattcaatttaacatattttggaaaaccttctatttctaatatgttaaaaaatgcattagatatgccttctgcttcactaagagaattttttagaatatgggattcgttagaaaataaaaagatacttagtctatttgagcttggtaaagcttttggaacttggactattaatgaattggttagggatgcactattatcccgatttcacatgattaattcttctcaccttttttcatccaatggtgttaacgaaagagggtttcaatttgaggatgtaataaaaaccaaaccaaagggtgctgctatgatagtgaatatgagcaggatatctccagtagtaagacgaatgattgttgagctagtgatgaataaattaattgaattattagaaaaatctctaattccaccaatttttatatttgctgaagaagctcaattatatattcgtgatacatattgggaagatctaataacaaggatgagacattttggaatttattctacatttattacaaatcagccagatgctataaatgataccatatatagacaggttgataatatttttttattcaattttacaaacgattctgatctagaaaaaatttcaaaggtgtcgttagtagactcctcaactatcaagtccttggtcaagacactttcccatagaaattgtttagcaatcggaaaggccgtatcaaatttgccaatggtgattaaaataaatccagttgatatgatgactctgggagaaacaaaaaaatttttcaaataactggattaccttcaatcgataatatgaattcgttttcagagattttctcaaaatgatactctatagaattgagccttctaatcacttccaaatttgttaataggtgtgttgttattcttgatattttgtacctggatttcccatcaacaaagcttaatggcaggactagcatatccgctaaatgttgatcaatacatgcacgaaattcataatcgtctacgaatttctttgcagctatattgcctattacttctgctttgatgcccttctcgccgatagaatccgcccccaaatatatacctgattctgaagtagtatatactagaattgaagatcctggactctctgaattttctaagatagatttgtgtttggagtatcttatgccttttttctccaaagttgctattgcacttccaatttgtctctctggaacgtgttttggcaatcttgctgctatgcttattatgtttggttcaatttctttgaaattacaaaactctattggatgaagatcgatggcttttcttattttgatttcgacgactccttgtcctcggggataaaatcctctttttaggacatttatgtcaaatacgattccaattttggagtatgcatctcttaatacatattttatgtaatctatggttggactaaatttcacatcggttccgcctgacaatctaattaccaagtctttttgagaaattgctactgtcggaattaatgtctgcaatagtaatggtatactgcccgcagttccaatgtctgcaattatgacatcatttgcaggtttatcatattcgttgaatctactatctttagatgcttcaaacctgatccattccgaacccaaacttacattttcggtatgtacattaaatattcttgaaagtaactgaattgttaagacatgctgatgcttcaaaccaggatcctttctatttgatcttatatttgtcacttttattggcttcccgattattgttgaaatagttattgcacttctaagaatctgtccacctccttccccggttgaaccatctactgacaacatttacaactatttcctcaaaactccaaccaatctgacttaatgataatattctgtggtaacacgtgattttgttaggttgtataaattctttaccctgtctaccccctcgatttcattaatcagttttattgtgggagtgggtactaactctttccagtttttgtcacttgcaatcctgtgccttacttctgtggcagacatgacttctctactaattaagtccggatgtatgatttcaattcccctttccttatataacatactagtaaagggatcgtttgtaaatacagtattgtatctaggaactaatagatctatgttatatgtccatagtaagtgtactcctacatctggaactgggataaggatgattttatcacgtttttctcttatcccagcggttatattttctctaattatttctattctttctccagcggtgaaaggatttcttaattcaaaacttttatctgagcttcccacagcaattattaattcatctaccctatcgctgcaccatttgagcgaatttaagtgccctttgtggaatggttgaaatctccctatatacaatcctcttttcaataatttttttatattctttttgattaaaagtatatctacattactcgtaaacttgtaatacgatattgcattattttattgattaaaaaagttattataatttgactgctaaaaaattctagttttgtcttatagtggatttggacgcgaagcagaatatgctgccggatcatgtcttactaattatggttgggccgtatttttttcaaagggtagtagaggaccagctgacatagtagccagccggaacaacaccttcttgttgatccaagtaaaatctagcacaaaaataccaaaaattcgtggagatgaaatacgtaatcttatacaaatgtctgaaaaaataagtaacagctatccattgctttcgtttgttcatcctcatatagaatgtaatgttaacaacaattcaattatttttggaaattatataataaatttcttcattttacctcaatgggaaagcgttgattttctaaaataaaaataaaatgaacactttcaacttttgattaacaaattagcatacatgtgatcggaatcatttattactaaaaattttccaaaattcttcaaccattttttcattcattctgatagaagttattgcaaactccttccaaaattcaattaaattagaaatataattttgccatgggttttcaaattgacctggatctgtttggcctttttgtcctagatactgagaccctgattcattttgaaaacctgttatattgttggaaaccaatttcattatctcctcattattaatctcgttatcggttccaaaaatgactgtttcttcgcccataggcaaattatataatttcattttgtcatattcgaatattacagactccaaatttcccaagtccgtaaacctttttccagcttccagtataataggcgtttgaatcatacttagtttaacatcattctcatcaattttgttatcttggttaaaacttatatcttggttaccattttttaatattccaataaattttattcttgaatcacgctgtaaaattacattggggtcttctctcacgctcatcgctttattttttttacaattaggactatatttagattcttttattgaatgaattattgtcggattggattggggagtttatcaattcatattaattcctcaatctttcttgctaatattatatcatttttacttataccgtttatgtcatgcgttgttagatcgatatgaacactattatatgatattgtaatgtctggatgatgattcatcttttcagatatcattgcaatcctcgtaacaaaactaaaagcttcaataaaatctttaaatttaaagttcttacttagtttattaactactttctcccatcctgctaaatcctttatctctttttcaaagtcttccatgaaactttaagggtgcaaaaattattaaacattgttgaaccgttaaccccggtatttttaatttggaattaatcaagtaaatagatcaataataacatgtacatgtacctttgattcacggagtgagatatcttaatactattttttgagacgaaagtaaggatataatagtagatgatttttcaattctttgagtgaatttaagtcaactaattctattcactgacaactaatttaatattaaacttcattactcttttgtatgattatggtaagggtttcgattgtccaaatgaagtcgtcaccagacaaagaagaaaatctggctttctctttggaacaaattgagcaatctgcaagaaaagaagcgaagattatttgcttcccggaattccagatgtcgttttctccccaatcacaatctagcaaagaattgttttcgatttccgaatccctgaatggtaattttgttaagcaattgaagaaaagcgccagagaaaacaatatctttattgttggctccatttatgagcatacaaatctaataacaaccaatacaaagcaggagaaggatagtaaaattaacaaaaattcttatcgtgtttatgatacagtggtattaataaatgaacaaggaaaattaatttcttattataggaagctgcatctttatgatgcactaggttttaaggaatctaccaagttattggcaggaaataaactattttctcctgttatttctcctttgggtaaacttggaactttgatttgttatgatttgagattcccagagctttctcgaatccttgccattaagggctctgatgcattgatagctccatctggttgggtgcagggaacaatgaaagaagatcattggttaataatgtgtagagctagagcaatagagaacggagtttatctgattgcccctaaccaaattggcaatattttctgtggtcgcagtttagttgttgatccttttggcgttgttgttatggatatgggtaattcagaaggctttgagtttatagatttggatctatctaggattggcgtggttagaaaaagccttccattgttaaagaataggcgaaaggatttgtaccatatacactagatagtaattgaattgacggtatcagagactttctgaattaggattaattgtgtaaaacgttactgaacttgacccaagtaattttctcttttcttgagttacatgtaatatgtgaaaacaaatttaaatctgttaccaaaaaaaggtcactacaatggacgtttccgattattacttaggtattgttcaaataaaaacaaaaacagaatcaatcattttgagattttatgcatccactttacatttttattatgctagagccctttctaatatatgggtgaaaaggtctatgtacttggtgctggcagtacaaagtatggcaaattacatgagagtattattgagatagccttgaatgcttcaagagatgccattgaatcagctggtataactccaagagacgtgaaagcaggatatatttcaaacgtctttggtgtggctgataaacaggttcacatggctccggtaattatgagtaaccttgggatccctgatgtacctggtcttactattgaatctgcatgtggttctggctctgtaatgtttagagaagcatttgcaaatgtatctgctggattttatgattgtgttttagcactgggggttgaaaaagtaactcataccagtacagttgaaagcacaacactcttttcctattgttctgattttttttatgaggggggtaacggagcatcatttcccggtctttttggttcgatggctagagcatatctggctacttataaagcgacagaggaggatctggctagagtcgctgttaaaaatcatgaaaatggttttcttaatccaaaagcccatgttaggaagaaaattactatagaagatgtgttaaaatctcctgtggtcgcatctccactaaagttatatgattgctgtcctttctctgatggtgcctcagctgtcatactgtgtaatgaggaattcgcaaaaaaaagcggaaatccgtatatagaagtagtgggttcaggtcggggtgcatcacccgcttcagtccaatctagaaaagatattaccacgattccaagtaccgttgaagcatcccgtcaagcttataaaatggcaaatctgtctccaaaagatattgattttgttgaggtgcacgattgttttaccattgccgaattaatagacatcgaagatctaggattctttcccaagggatctgctgctcaggctgttagagaaggacgtaccaaattaaataacgatattactgttaacccatctggaggtttaaaatctaaaggtcatccaataggagcaactggtgttggtcaagttgtagaagtatttgaacaatttacgaataaagctggagaacgaacagttaaagatgctgagatagctatgactcataattttggtgctaccggggctagcgcagctgtacatatattcaagaaaataaaatagacggtgatattgtaattgacccaatcaaagtcaaaaaatcaaagctcccgagaccggttcatcgaatttgcgaagaatgggaacataattcttaatcagtgtaataaatgccataatattatattagaaaccatatattattgtgataaatgtttttctagctcttttaaacaaatatcatacagcggtaagggcacagttgtaacatttacaatccaagcggtagcaccagaaggatttgaagatgtcaattcgtatgcttgggttatttttaaattagatgattgtgacataaatgtctccgggtttctgcctggaatatcttcaccttctgatctaccattgagttctaaaatcaaagtgattgatttccacgaaaaacatggtttaatattgcaaaaatatcaatagtttaatgtcgtaacaccctagctaaatttaatcctcctttttgtttacagagtttaacatttgtttttaacaaatgtcctgattactgatgatttgatggaaaaaagtggccagttctattatgatgttaacagcgctatctctgtgataaatacgcaaatttcgcaactcaaattaatggataaaaaattttctaatattgatgctaattttagctccaaaataactcaaaatataaaatcaggaaataatgcacgtgcaaatatcattgcaaatgagttatctgctatgaggagacttagaaagaacactcacaatgcaacaacggccttagaagtcgttgcaatccgattcaccacaataaccgaattctcaactattatggatacaattaatccgactgtagaaatgctccaagatattcagaaagatctttcaaaggctgttccgtctgcaactgatgttttgaatgacattcatacactaactggtgatgtattaattaattctaatattgacaccgatgctggtaaaatagcatctgtgatcgataaagatgctttggccatattaagtgatgttcaaaatagtttggaagacgaggcaaaagaaaaactacccgaagttccagtttctgtcatttcaaagagacctagtattaatttaaaggatgatatacttaacagcggacaagtgttgttagaaagctagattctcatcaaaccagagcatcttatccttatcctgaccgatagttttatttatatactaataataagactgctctttgtagttgaggtatacatatctgcccccatccgaaactaaacgcggagttttggaatccacatccaaacgagtaagaatgattttttcagtaatggccagtcctaatcgaattgatatcttgcgcattcttaataataaaggacctctaacctactctgaattaaaatcactagcaggatttaaatcaaagaaagaatctgggaaatttgcatatcatttaagaaaactattgagacaatcattggtaggtctaaataagggtgaaaggaggtataccattactaatctaggtaaattggtgttaaacttggctagacagatagaagaaaagtctataattgaaagtgggaaaatgtatgttagaaccagccatcaaaccatcgaagaattcaatccacacaaaataattcaatccttggttagagaagcaaatatgtcattagaacaagctacaaaaattactgaagaggtggaaaataaaatatataaactctcaacctcttacttgacttctagactaataagagattgtgtaaataatgtattgttagaacatggtttagaggaacaaatgaataagttaattagaatcggagttcccatttttgacttaaataaaaaattccatcataatgataattcattaagaaatggcataaatgacctaattacagatatttcggaaaaagttttttctgattattttgcaaataattttcaaaaagatattatggatatgcattatagtggtgaggttcatttagatgcattaggtcattggggtataggcgctgatactatttttgttgatatcgagcaagtaaacaagaacttgaatctcaaaagccattttctttttttacctaggaatacacatgctcataaattaaatatcacattgcctatcatggtttcattacttcaaagagaggtttccagagagatagtcatagaaaacatcgataaaatttttagtgattatgctattgataaaatatctgattatttttcattttcactgatttcatcttctgtttcaatgcagtatgcaggatctccatttataacgctagttttgagtggaaatgaaaatagcgagcgtttgcttcaaatgctaagtggatatttgtcttatatagagcaagtatctctgcccaattttggactttttataacttttgcaaattctttatctaatgacttgttgtcccttcttacaaagatcataaagttaggtggtcgaatatctctctcacaaaaatcggttcgtagtagtagaggtattcgtaagatgcatcaagatatggggttgccgatcgtcgcactacattccctttctataaatttgccccgtttagcttatcaatcaaataaagatgaaacctattttaggactaaactagccttgttaatgaggccctcagtaagtactttattactaaagaaggagatattattagaaaacattcgacaagatatattacctgctctatcccatattatgggttttccacaattgggttctacttctataatcgttaacttgactggattagatgaatctattcatgatattttgggattttctaaagatgtgggatttgatattgtaaagaaagtggttaaaacggctaatgacgtcctaattgatttcggccaacataacatagacaaatttggcgtttccatcataaatgattctagttcaacaagatttgttaacctcgattccgagaaatttggtaaactgactcatgattttagatcatattcacaaggactagttattaccaaaaaaatgcttgatgatgaagattcattatctagaaatctaattgaattggataatcttatggccggaggtttgtacgtaaaactactcactagtgatgttcctactcaggaaatggtggaattgatacaaaaatccgctaattttatcccctactttgatatatttgaagagaatcgcatatgttctatatgcggaactcgagtggctagtagtgatgtttgttctatatgtggatctagaaatattgtcacatttaactaatatccattgttcagcacatgttgaataaactccatccatttagtcccttagtcatttttttgtatatctgttagattattcataattgtttaagaccagtccattataatacgactgtctactacatggtatactttaagcctggatgtaagttcttatttgaaactcgctaatttataaaataagctatcgaaattaatataaacgatctataaataatatataaatgttatatggctgaaactgatcttcatgattcaaaaaataaaaccattgtacatattaaaaaaagaaatagtacaatagtggattttgagcaatcaaaaatatcgaatgcaatttacaaagcattggttgcagctggtaaacccgatcataaattggctgaattacttgcatcaaaattggtaaataaaattattaaaaatggatacttggagtccattcatagagatcatgttttgagcgtcgaagatgttcaagatatggttgaatcaatattaattgaagaaggtctggctgagaccgctaaggcttacatcctatatcgtcatgaaagaagaaaattaagggaaatgaaaatgaagatcttaaataaaaaagatcttgacgaagtggataaaaccctggatgtcaattctctgcgtgttctgtcttcaagatatttattgagggataatagtggtgaaattatcgaaggtccaaagcagttatttgaacgagtcgcaatattggttgctatatcggatattattcatgactctagagtttatgattttcacaataatcatacacagactttatctgaagcagaattatattataaaaaattagacgatttcgatagcaagttaaaaattggaagttattatttgaataaatatcattttgaagcattaatcagatcatatattgatgaggccaaactgggaagaatgaagttaagctttaaagaacttttacgattgattgcagaaggaaaaatgagcaattatggcaacaaaataacggaatattacaatttgatggtttctaatgaatttcttcctaatacgccaactcttatgaatgctggtgccagattgggacaactatctgcctgttttgttcttgatatgcctgatgatatgtattctattatgaaatcatccactgacgcagcaatgatttttaaatctggaggaggtgttggaataaattattctgacttaaggcccgaaggggatatagttgcatctactagtggtgttgcatctggaccaacttcttttatgcaaattatcgattcaattacagacgtagttaaacaaggtggaaaaaggcgtggcgcaaatatgggtattttggaatcttggcatccagatatcgaaaaattcattacaatgaaaactaaaccagggatgtatgaaaattttaacgtaagtgtaggtatctggtcagatttttggaaatcattagtaaataaagcggatcataaatattctctgaaaaatcccagaaccaaggctaatgtgaaaaatatcgattctcatcaattaatggagctaatagcattgagtgcatggaagagcgctgaacctggtgtcatattttttgataatataaataaatacaatccttgcatcgatgccaaagggggaccacttagagcaactaacccatgtggcgaacagtccttgtatccatgtgagtcctgtaatctcggatccattaatttatccaaatttgtaaaacgaaaagcagatggaatgtatgaatttgattggcccaaatatgaacaatccattagaacagctacacgatttttggacaatgttattgacgtcaataaatatcctgtagatgaaatagatatcaatacaaaactaaccaggcgaataggattggggattatgggtatagcagacttattattcatgttacaaatcccctatgattcaaaggaaggatatgaattcatgagtaaactagctgaaactttgtcgtattttagtatggatgaaagtgttgtcatttcaaaatctcgaggtgctttcccgttatttgatcagactgagtataagaatggagatattccgctgtcgggttaccatgagatccctaaggattcacattattatgattgggactccttaatagaaaaaattaaaaactatggaatcaggaattcatggactactactatcgcacctactggtactttatcaatgatttcggatgtatctaatggtgttgaacctgtttttgctttggtgtttgaaaaacgtgttactgttggtaggttcttctatacaaacaagatttttgagaatgttttgaaagaacatggattatacactgatgaaattttgataaaaattgcaaataattacggatccgttcgtggcataaatgaaatacctgaatggatacaaaagctatttgttaccgccatagatattcattggaccgatcatattatggctcaagctgtgtggcaaaaatggatcagtaacgcgattgcaaaaacaatcaacatgcctggagatgttacggttgaggatgtaaaatgtgcatatctacttgctcatgaatttggattaaaaggggtgactatctatagagatggctctaggaatgaacaagttttacatattactggtaatgatcgtgaaaaaagattccaagttaaaccaagtatgtatttacatgattatattttaacaaacatacatgaaccttatgttcttgatcaggtaaatccaatttttaaggattatgaatcaagtgatcaatatgccgtagcaactaatacagtcgataaccaactagaacctaatagttttgaatccaatactgtatcaattactaccaaacctgacccatacactcttacaagaacagaaagcgataaagaagcatgcccagtttgtaaaaattacttaattattacagaaggctgtaatatgtgcattgaatgtggatttagtagttgtggctcaggatgattttttatccttgctgtctactgaatgatggtatattttagaaagtattaattacatggttattcatgattcaaaatagattttttaatcgcaatatagtgtccattcgcgatttcaatatagatgattttacttttctctttgatattactgataaaataagaacattgaaatctagagagcgtggagaaatcgcaaaaggcttaattcttggatatattttttatgagtatagtactagaacccgtttaagtttcgaatctgctatgtcctccattgggggcagatctttgggaatatcaaatgtggattcttcatctatcatgaaaggcgaaagttatgctgataccattaagaccatctcattatactctgatatcattttaatacgtcatccttccgatggttcgagtagatatgcttgtgaaatatcagaaaaacctgtgataaatggaggtagtggtagcgaagaacatcctactcaagctatgttggatatttacaccatattcaaagaaaaaaaaagaattgatggtctatctattggaataataggagatctaaagtatggccgtacggtatactctctaatctatgccctgtctaattataaagtcgaaattcatcttgtttctccatctgtactaaaagttcgaagtgaatcgatatacgatatctcaactaaggtaaaaatgtatcatcatattgaattatctgatgacttgttagaaaaattagacgtgatatatgtaacacgtatccaaagagaacgatttccggatcttcaagaatataaaaaaattcaaggattgtatactattgatgaaaatatcttgaaaaagtcaaaacctgatgtttctattttacatccgttacctagagttgatgaaatatctccatcaattgataatactgtgaatgctctttattttaaacaagctgcttacggaaaagagttaagggcagctttattgtccgcattactgcatgaagaacctttctgatctaaaaaagttgtttcaagatattaatttagtaatatatacttttatgtattaaagatcaatctcaaacaataactccgtggcctcttccacatatcatcgactggaagctgcttttatcgagtttagtggcacaccactttaaatgttccttttatagtaactattagtgcgttttatgcatgcggtgagcttaaactttctcaattcatgaaataaagcttacattaatctttaatatttggtctaaaaatttatcaacggatgaatttttaagagaacatctccatgaccatgggaaatatcgcatatagtttcctacccagtgatctcttttaagaacactcatgaatctatattagaaaaaccttgcaaattggtaatatgtttgctcattttgaattatgtgagcgttttcttatatgtttcttatattatctattttcatgaattgattgtaaaaattagattagagtgtccttatttatttttgcgttcttggtccttctcataaatttcaaaataagtttactgcaaaaccttttgctgttcaaggaatgatgtctacccaaatagctggttccacatgaatggacccatattgtataccaataaatagaatttattatatcaaaaaaatgaatgcaaatgcaggatgaacggtctagtaatggcatgattctgatgtctaccttcaccgatgaacaatctttaatcaatctatctaagatacttgtggtggagaagaaattatgtgcgtgcgtaaattatacaagaataaattctttgtatgtttgggaatctgaattaaaacaagaggaagaaattatcgctttttttaagacctcctcgagttgtatccaagcattgaaggctgaaattctagcccatcatccatataaagtacctgaaattgtcattattaagatggatgatgtttcattggaatatctttcatggattattaacaatacacgcaacggtaatcctaatttctaatttggattgatactatgctattgaatttttctatgtctcagcattcaagatctaatgaataaattgttattgtccgcactttaaataaaatatatgcatattgaaagtctttttttgaattggttcataatacgtcattgtgttatgtggatccaaatcagacttcaatttattcgatatcgcaataatgcaattattccacctagtgatgacacccttaatccaatatcggtagttgaatcagttgcataaatttttacattattatattccatattgtttagtagttttatgaactcgtcttcttttatttctgaaaaaaccttgtcagaataaaccagcgaatcaatggcatttaatgaattagcgtattttgtctcttctattcccattgcatattttttttctccattgtttatttgttgcatcactctatccaaaatcttcgaaaccatggcaattttgctactggacataagatccttcatggcttctgatcttaaaaatacataaatcccgtcctcaccagctgtttcaataccgtccgcaattacaaaatctttgtcttgatagacttcgtttttttcccttatatgattaaggaatcttctctttgtctctccgggaccaaatattactattttgattccttgttcttctaaataaatatctaaggcagttcttatattctcaaaatagatcctattgcttgattcatttctttgatcagtaacgtatcttttgccactccttccggaatatatgttaggagttattttcaaatttgttccagttaattttgcaatagctgtctcttgtgagtctattgagataaataaatatttaaattcaagagccgactttgatagtatttttatatagctttcattccaatttgatttttctaggatgatcgtatcattgatttttacgttaatagaatggtgcagacccttaggtatgttttcattgtttgaagtaattattactcctgatatcttcaatctgtctattgcatcatcaaaactaattttttctattcttaaaattatcctgattttaattctttctcctctgtctggtctagcgtattcattatcctgtttgattaccctagtagtatcggcaataatgctgtctcctatgtctattacccttcttaggctaaaaagaatcatctggttcttctaaggttaagactattttgttttctgaatcctttactttagtgaatttcattttttacttgtatcctatttaaccaattcttcatcttgtttttgagactccaaatagcgttcaaatcagtgtttggttaaaactcccgattccaccaaattggctaatccgccgggtgatgcttcgcctatgactttcccattcttgtcctttaactgtctccatttcaaaatgatatttccagttttcgatgaataggtcattccaaatatctcttttgcatttacaaatgtaatttctcttaatttttttaccatgagtttatctactgcttcaatataaatatagcctggtccggtatctctttcgggaaacatgtctggatctctattataattattaggagtgaatgatttacaagtgctgaaaattataacttttctaaaactttccaatgatgacgtagtttctatgtgaaccactactactcttcactatgtgttattaatacaatgaatatatgtatttgaaatctaaatctaaattcaaatttttacaaacaatcacaaattaaataggacaaactctttactcaagatctacttcatctactcagtagggcttttcacatcattgtttgtccttactatttctaaactattctgttataaggctttagctgtccaatctatccttttgcatcttgccacaaataatgaaaatagtctttagcaaaactggccaatcctgtatgctctgcccatatggctatagtgtcatagctggaggttgtcgttggatcattttttccttctccaagtagaattaatacatgtctggaatctcctatgactccgccaccaaacatatcattcttgagcctcacttcagctactctagacattgcttttacggtttcaccattagtttcatcggacgccaaaataataatttttactcctttttcgaagagttctcgaagtactggttggatcgattttacgacattctctggaattttggggatggctattaagagttcttcctttgtcgattggattatttcagtaacttttattgctatgttgtataatccacttaccacccagatatctggtttctcttttagtccagttttttcgtagatcggcattaattcattgataatgacatttttattgctccttaaattgttctccatttctatcatcatggcttccactgcatttgatggtgatttaggaaaaaaattctgtggcctttggttatccgaatatatccatcctcttacatacagactatttagaacatcatagatttttgaatatggtactcctgatttcttactgatttctgatgccgtatttgaactggcaaacaacaacgaagtatatactcgaatttcgtaatttgttaatccaaggctttccatagatttcttggccttgtcgctaatttccatagttttatgtgactagttgaaacttggatattaaatctttcatctatactgtactttactaactaaacaccgtaggatttgtcagatcatctttataaagttaatcaagcgcagtaataaaggtcaacattatggatctaatacaaatttccaatttaactagtaaaactattggttctaaacgcaccattagatatactcaaagtatctgcccagattgcaatatgattctagacgctgaggtctttgaaagagaaggcaaagttttcatgacaaaaacttgtcctagccatggtgaatgtgaggaattatactttggctcatatgaaatgtacaagaaattcagtacctattggatggatggaaaaggtgcacaagctccaaatgtgatggttgataaatgcgcctgtcctactaattgtggtttatgtactaaccatctttcacattctgggttagcaaatattatagtcactaacaggtgtgatcttacctgctggtattgcttcttttatgttaaaaagggattagagggtgcttatctgtacgaaccttcacatgaacaagtacgtgcgatgatgaaaaccttaaaggctgagaagcctatagcaggcaattctattcaaattacaggtggtgagccaatgttaagagacgacataacagaactaatcaaaataatgaaagaagagggtgtagatcatgtacaactcaacactaatggcattaaactggcactttcaccagaaacaatgagacaaattagaatgtcaggtgttagtaacctctatttgtcattcgacggagtgacggctagaacaaaccccaaaaaccactgggaagttccatacactctagaatcagcaaggaagtgtggaatgactgttgtttttgttccaactgtaataaaatctattaatgatcatgagttgggtggcataatacgatttgctcaaaaaaatatggatgtagtacatgctgtaaatttccagcctgtttcactgacgggtagaatgagtaaaaaagaacgggaaaagtatagaattacaatacctgattgcattgaacgaattgaagaacaaactaacggtgaaatatcaaaagatggctggtttccagttccgtcatgtatgcctttaacaaatgtgatagaggcatttagcaagaaaccaaagtatgaattatccatccactttgcatgtggtgctggaacatacgtttttgaagatgttcaaacaaagaaactgacacctttaacctcctttgttgacataaaaggtctcttggagtatttcgaagaaaaaactgaagagattaaatcaggatcgaataggtattggactatgttggaagtgatacgaaagcttaaccagtttgtagatcgcagtaaacaaccctacggacttgatttgggacgaatgttttcaagtattcttctcaaacagaattttgattctgtaggttcatggcatgtaagatcattattcttaggaatgatgcatttccaagataagtataatgaggatctagaaagattacagagatgtgacattcactatttgactcctgatttgcgtatagtaccattctgtgcatttaatgtaatacctgaatggtaccgagataggatacagaagaaatacagtgtaccagttgaagattgggaaaaagagcacggacagacattagaagccgggttgtatcgtggtataatgagaaagggcaaaccagaggctcaaatgggatgtgcaatgtctgagatgcataaagcagctgcagaagcagaatcaaatgaggaacaccgaggggttgagctccgaaatggaatggccggtgcataaaagccaatcttcatttgagaagttaattttttatatttaataatttttttagatttttagatcttccgtttcgcaacttttaattgattcttgtagatgtttttgtagataattttaaatagcttgaaagtgtagtaatatatgtaaaatgccgtcgtcatcaattaatgcaattactcgtatgagtgcaaccttaaaggatctttttatttatatctatgatctgtcaccactagatatggatttattgcttaccttaatagcacataataataaacaaatgactttagaagatttatctaaggctgtaaatcgtgacaagagcacggtatttcgatctttacaaaagttaacaggattgggaatatgtgtaaaagaaagcagaactttgaaagaaggaggacatttccatgtatattctgccatctctagagaaatatttaaactcgaaacggaaaaacgtgtaaaggaattagaacagagtttaagaagaatattgaagaagtttgaagatgatctagaagtaatgttggatgatgtttttgacacaaaaaagaaaataataaagtagacagaaataacctcaaaatacattggatttcaacttagataaggtattcgaagggtctggtcaacaacatgttgatatttttttaaattcttattattcatttctttttttaaaaaagaattcattctacgattttttaaaagcaaaagatgatgcgaattcacctgtcatacgactgttgatttcatgtatggacaacgatcaatatgattcgatagtagattttttcaagcctttcaaggatgtacaagtaaaaaatatcataatatcgactgaacccaccgaacacatgattacaattattattaatcaaaatcaagttgctttttttaaaataaattacaacactgataagcgaatgtttacctgtaagttatccgattcgcttactggtgatattgttactttttttgataccctttttgtcaatatctggagcactattgataaaaatatcatcctcgaaaaacgtaatatttttcaacaggattttgttgatattgcttcccatcaattaagaaatcctatattacccataataggattttctaaaacattaaaatcaaaaactgaagatcctgatatgttggattatctcaatattattataaagaatgctgaaaaactgaaaaatattgcaaatgatattttggatatttctaaaattgaagcaaatccgctgaaattagatttcgaaatttttgatctatgcgaacttttggagattattgctagagattataatcaattttcaaacaaagactcttcaggcattcggatactttttcaaggacgtcctaatgtgtttatagaggctgataaggaatacattaaacaagcatttgaaaacattctaaataattcttatttttttacaaaaaagaatgaagggaataagattattatcagtgtctttgaggatgatgatttctatgctaatgtattaatagaagatgaaggacctggtattccagacgatgatccagaaagaatctttactaaattctatccaaattctggaggggccggacttggattgttcatttcaaaaaagattgtggaaatccatggggggaatgttgttgttggaaataggatagacgacatcggagcgaaatttcttattaaaatcccactgaaagggacaaatgtgcttagtcaagctgacgacaataaatctaccgatggtcttaaactcttaattattgacgatttttcagaaaacctggaaacggtcaaagaatcaattgtaagtttgggatacgatattgattattttgaagatccttataatgcgatagaaaaatttgttccaggaaaatattcactggttttcttaggtattaatgtcaaagggctagacggctttgacctatatgatgatctaaaaaaaagagataagaaaattaagggttattttatgtcctctaataaaataaataaggaagctatggaatttttgaataataatatgatgtatgatcactttatttataaaccgctttctctcaatgcaattgtaaaaattctacgaaatgagcacgtgaattaaaaatactaatcacatcatagtaaaattttattattcgtttgctttaactgggttaacatgaatgttctaatcattgaggatgatgatgatatttgtcaattgtattctatatggttagaagaaaaccgacatgaatacattattgcaaaaaactatgaagatgggatatccgcatacgaaaagtcgattcaacaaggtgacgaagattatgaatctgataatactattttcgatttagttgtccttgattacgatttaccatctaaagatatgtcttccaaccaaaatggtttacacattgcaaaagaaattttggaattaaaaggcgatcaacgaataatgttcgcatccgcctggcccaaaaaagcattcgtcgaatacgtttctactctaaaaagtgtacctgaagttcttccaaaacctttcgaaaaagaagaattcattaatctagccgaaaaaattaatttatatgatattgccaaaaaatttactaaacaacttcgagagatgaaaaatccaaatagtcccaatgttgatatcaaatcgctagaatctttgtttaaactcatgaacaatgcgagaagagaatttttgcaaaaagatgatgataaaaacaatgatatagatttcattgaatgaaatttgataagatttattttaaagaaccattgaagtttgtttatgtcttccatgaaatatattcaaatagatttacttaatgaaattgcaatattgaggataaatagacctgaagctttgaatgcgatgaatcttgatgtaatattcgaactggccagagcaattgacataatttccgcagatgagggaatcaaagtactaataattaccggggcaggagaacgctctttctgcgctggtgctgacatttcatacatggtaaatattgacgccataactgctgaaaaatatgcctcatctgcgcaatccgtgctaaataaaattgaaaagatggagaaacctgtaattgctgcaataaatggttttgcacttggtggcggatgtgaactatctttagtttgtgatataaggatcgcatctgaaaatgcaaagattggtcaaccagaagtaactattggtattcctcctggatggggtggtactcagcgactacttagggtaattggaccagcaaaagctaaagaattgatttttaccgggaaaatgattgccgcacaagaagctgccactattgggttagttaaccaagttattactttatcagatgaggaaaagcgtaatttagatccatctatcgatcaaaataatgaaaaggagaaaagtattgcactctcaaaattactaaataaaaaacttttggaacattgtattacttttgctagcgaaatcgctaaaaatagctttaatgctgtaaaaatcagtaaaatgctaattaataaaggtatggatgcggatattgatactggtttgaggctggaaatttatggctgggctttgtgttttgctcatgaagatagacagaaaatgatgagtgcattcctcaataaaaatactaaaaaatgatctatttttcttcaaagcatggattttcatttcaacgaaattattcttgatccattaccggatttagatataaatgttttacatttgatatttattttatcatattcctcttccatgacttctgatatgcgcagcccctttttgtttgaatctaaaaaagctaccgtagaaggaccggctccactaatggtaaaagccattgctccctcatctaaggacctttcttttattttatcatatcctgggatcaatttctttctggcgggttctatgatacaatcatttataccattacaaatcatttctacatccttgcgataaaagcctgcaactacggaacatgcattagctacattatgaaccattttttctaaaggtacttgttgaggaataacttttcttgaaaactctgtcttcattttaggaacttgaataagtggtacgcatataaccatagatagattatttggcgattctatcctgataaattctaattttggattagtcttaacgattacaaaatttccgaaaaacgagcctgcgacattatcgaagtgctttacacccgcacttgcgagttcgccttcggcggaataatctagtaatttggtatcatccatattcaggccaaataatgcatttagtgaaactgcagttgctaccgctgatgcgccactacttcccatcccataccctggtggaatgttttttctaatttctattaaacagttgtaattatataaatcataatctgatataattttttttgctaccttgcctgcagaattggagtcaagatcatttggaatactcttgcccatatcgcccttcattattatttttacattgtttttgtttgctattgtttttctttctattttgatggatactgtatcctgtagtacatccaggcccaacccaaatacatcatatccgggacccaaatttgcagttgacgcggatgcagtagcagtgcattctagataatcagctacaatttcatacctttcttttttcattcgtgtttctgctcctcctcaccttgtgttaatatccttgataatgctgcagttaaatttatcattccattcatagttaagttagatactgcaatggggctcaacatatttccacttttataaagtgtttttataatgtccttacccaataaagattgttctgaatctttttctagatttagggagtcttgaagcgaggtaatggagttggaccaattcagaatttctgtcaacttctcaattattttatctcgtttcgttaggacgttaatctgtggaatgtttagacgtaatctgactgattgtgacaaaaacatcaaagaaacaaaactaattggagacattgctaatgtaccatctatggtaaatagtgtgactttagaatctgaataaaaatttgaaacaaagtaaggaccactagacctaaaagcaaacagttctatttgtccgggagtatcgattattacataatcgggattaagttcctgaacctgagtttggatttcgtctatttttgtcgatatcaagtcattagccagtatcaatgacccatttggtcctaatttgtaatcatccattatcgaataaaaatcaataaactctctcacatctatatctggatcatacggtaaactagatactcctggatccaaattaattgaaattggtgagacatcattgttgtggtaccattccaacaatctcgaagtcaatagtgttttccctgaaccggccgtaccagtcacgaatatagtatacatttcaaaaatttttaattgctattctaattttattgttatatttgtatgattattatattccttcttttgaactagttgatataccttgaattggcgaataattttcattcttgtaagtgttatccctataatgcttatttttctatttactcctgtttcgctaaatgatgttttatctgtaggtgttatcccttttttgctttcctttcttgcaacaatgataagaatttttcttcaagcaattaggttttattactttgttcgaaaatttattggaaagaatgtcagtacattttggaaaattatttttgccaggttagctggagaatttgtaactcaaactactccttcttatattggaggtgagctagttcgaattgcttttttaaccaagagtggtgtaccagcgggacgagcagcatgggttactaccatggaaattattgccgatgtatttgttggtacaatcttagcttttatcgctggatttgttgcaatagctaacggctccatgtttattggtctgttaattattgcgatttctgctcctacatttggattttggttttttatcttgatatattcagcaaaaaaaaatatccaattaccttcattttctttaaaattggcgatgaaatttatttcagaacaaaaagcacagcgggggatcaattctgttaataaagcattggatgatttgtgtataatgagcagagaaaactttagttcatttaaatctgtaaaaatattttccgtgggcattgcaattacagtggtcgcatttattttccaaggtctttcatttctagttttaacacattctgtagatatttacataggtctattcttgtcatttatggctacggcttcttctacaattttgggtacccttcccatcactataggaggttcaggcttagctgagtggggattatgggcatatatcaatcaattaaataacgtttctcaaattggtaacatagtaaatgatatcgatcaactaaacgtcataattgcatggaggattgcttcttactatttgcctttagtaataatgtggattgcattgatgaggttagcattgggaactaattattcaaaacctacctcaccctcttccactacacctgatagtcgagctgattgatagcattttaaatgatgattatttcttttttatatggtgaaaattttaaccgacctactaaataacaagatagtccttattactggtgcatcaagcggaataggtagatgcattgcaagtgatttttcacaatttggtttgaaatccttgattctaattgccagaaatattgatagactgaatgattctgttatatcaatgaaggaaagggactttgaaatactaccgctgagttgtgatgtgtccaaaaaagaagaagttaagcgcattggtgatctgatcctcgaacgatatggatacgtagatgttttaatcaataatgcagggattggcatatttgggacggttgaaaaaacatccattgaggaaatcgaaaaagtcagtttcacaaactattttggcatgatttattttacaaaaatttttcttgattcaatgattaggagaaatagtggtcatataattaatattgcctccttagctgccagttttggtatacctgggatggccgcatactgtggatcaaaatttgccatgttgggtttttctgagtccttacgtcgggaattaagaaaaacaagtgtaaagatatctgttataagtccaataggtgtaaagactaatttttttaataatgaatattttaataataaaactccgatgaaatatatgttaaatccggaaactgtttccaaggcggtattaaactcgcttacatccgattcttttcaaatttttgtaccccaaatagctggattatccgtaccgttcaaagattggttttctgcgataattgattcaattattgagcgccaatttcgtaaaaatcttagctgaactgaatttattattcctcttcatcttcatccttgtccttcttatttggatcaaaatctgattctacatccatcatttgtgcactctccaaatcaaatttaaaaatctcatccatatcaatttgatacttggtttttaataattcacataattgatcacttagtttggcttttgatattttgattttatactcatatacgaaacctttcataagttctgaaaccttcaaatcatctactaaatcgatttcttcaattattgttctaccgtcgggtagtgattcgtagagctggatatctgcttttttggtttgttcattgatgtctagaaaataacctgttctattaatcgtgtctagtatttgaaaatttgcatttttcagttcattgtcagcccattcgggaagaccattctcctctgattttgtctttgccgcttttcttgccatttcttgcccgttatgtattctagtactttttattaaaaactttttcaaatttatctttgggcttctagaaagcattatctataagattacgtatactttggtccttgaacatcgttataaatggtgaatttttacttgatttaatccggggtcaacactctgatttgatacttgttgatacccgatcatttgctgagtatgctaagggtcatatccctggtgccattaatatcgatttgatgcatttccattggtttgatacttctacaatgggaattttgcaatttgaaaaacaaatgggtttactattaaattatctaggtattaatccctcaaatagggttattttttatgataatgtttcaggtcctaccgcttctcggggtgtttggctattgaattatttctctcatcttaattcatttatgttagatggtgggtttgaaaactggtcaaaacttaaatatccagttgaaatgaagacaaaccaatattcacattccgcattcaatttttatacgaatagggcgatattagctgatttggaatatatgaaaaactgtgtagataaaaattcaccggatgtggcaattattgactgtcgttcccaggctgagtacaacggctctattgcccgtgcttttcaccgggggcatatacctaaatccgttaatgttgagtggtcaaacaatcttagcaatgagaaattcttaaaatttgacgctttggcgaggttatattcctttatatcaaaggaaacagaagttataacgtattgtcaaggtggttaccgagctgcaaatacttatcttgctcttaaacaacttggatatcccaaagtaagaatgtacctgggttcctggggagaatggggtaataatcctacacttccagttgaattgaattaatatgataactgacgttttaccttcctatgaataagctaaatgttctaataaaaaatggagataattattttttattaattggaagattgtttaattcttgtagttgtctatctatctcagttgtattttcctttccatatgttatcaatattctgtcgtcatcgttatttacatagctcattatgtcgttagtttgattaccattaacatagaattttagtttatattggtcgttatcgcaaaagcgctggttactatctgtaatgaaacacccattggaagcgtccattctaatacttttgaggaattcactaattggaacattagaagagtgtttatggattgttgttccatccagtgtgccattgtatgtttctacgtgaatatagttagacctcaccatgtatttttgttgtgctagatccaagtttgtaccatttaggttaatcaataatgctgcatgttcatgtgctgatcctagagcaccatatttggctgctacattttcactgggaaaaaatattgctaacacaattgcaagagctgctatcccgacaacaacaggaactattattttcaaatattgttttcttttcttacgacctcttgcaaaataactactatcgttattatcatccttgttaggagcattattcttgttactatcaacgtctgaattctttttcttcttgctcattctatcgtaactctactgatatgctctctaatttaaaattaatatttgttattctgcgtattatttgtcatttcgcttatgatgcttcttaattttaaagaaaatggatgatttggattgttaattactgtcaaaaactctctaggactaaattgtatgtcgcaataacatggcaggggggaaagagagtttgcaccagtaacagcatgaagttcttccaaaactttcttatgatcttggttttcttcgatatttgaatcgagtgtggtagtcggaatacaatatcctgatatcctatttagcaatatataagaaatagcaccaaatcgtacaaatgttgtataaatttcaaacagtagttttttagttccttcaatgtccaaatcatccattttcatagtaagtattaatttatcagctattgatagggcattaatggaccaatgtcttattcctggactcgtatcaataatgatataatctgtatcaagctttgtaataatttgttctctaagaaaaactaatttcctaaactgttttttccaataatctgttccattacccatttcaaatttaaatattgcatctctgctaggattagagaatcccgtatagagtctccctgtaaaattgtcctgcttttggtcatctttgaaaagaatttcagtcatatcaattatcgattcataaatatctgcattattatccaaaaagtcgtttatccatttttttggatttatcttaaaataattatgtaagctgggtgcatagacatctaaatctagtatggcaacctttttccccatttttacaagtaatgctgcggtattagcagctattgtggtcttaccagtgcctcccttataggaatgtattgctatacagtgagtcatactaagcttgcctattacattatttctaagttcaatattaaatcttttgaaaatttgttattgaaatagatatgttattgttaatttcagaactgtctatcttcctttatgaatcattgatttattgatcctactttcatcctattaaatagaataacgtagatttgataagagctaatcataggacaggttattaaaacgtaccgtatctgtatatcgtattcatacatctgtgtcctctatacagatcaggtgaaaagaccgtttgatggcgtatatatgacatgtaaataaatataattaatggctaagaaggggaaattagaagaaattatcagtaaagcactctatgcagatgatgcatcctcgtatcttgtaacatatagggattacgaaaattataaactaatcgacttgtcagaattcatcttaatatctgaaaattttcaaacaatccctgcgtcaaggataacaagaattgaattaaagggacaactactatatgaaaaaaattaaaataatacattgtttaaacaccaataataataaatcatggaaaaatatgttaccgatttcaaaaacctttgcaatgaaattgtgcaaatcgattcgagaatacgattcattggggttgctgacaagcatggaataattattactactgcagaacgtaaaggaataattccacttttaagcgatgaagaaactgagcaatatgctatcactgcttctaccagacaatatacgaggcttaggtggcaagatatacttggaaaactaaattatacctgctctctttatgaaaaaattttgcgggttacgataccaattacaaatcaaaaaaatagattagaatatctcttgatctttacattagatccacatacagatgattttgataatttaatcatggaaaaaataatgccgtcgattagtggtttcttttcaaatcttttcaaagtaaactagtccagcattaacaaccagtatacgaaaataacgagaataaaaaaccaagatcaagaaccataattaattaattaatagcaatagttaaccgtattatggagaattcttttcattttcatttctaaaccattgctagtctttcaaaaaattctctgaaatttgtgatacttggtccatatttgataatcattcagtagtttaatagatccatctgaatgtttttaaaataaaaaaatctaattgtatttgttgacaattatcggtaatatttcagtcactccagatggaaagactcggattatgggtatcattaatgtgagtcccgaatcattttacaaacactcgatcaaacatcaagaagacgagattcaagatacaatccttagaatgcaggataatggagttgatatagttgatgttggtggtatgtcaacggctccatacttaaaaacactgattccggaggatctcgaatcaaaacgattgcacaatgctatctcagctattagacaaattagcaatattcctatatctgttgatacagttagatccgacgtaatccgatccttattgaaattagaggtgaatgcaattaacgacgttactggtttaaaatatgataaaaaaatgcctaatttggcttccgaacaagatcttcctgtaatccttggcgcttacttgtcagatagagaaaatctttttggtgatggagatatacaagatactagttctttattagccgaaagtattagaattgccaagaaatgtaaaatcgacgatgataaactgatcatcgatccttcgattggtttttttagaaaagaaggattcaatccattttattccaaaactctgggaatgaattggtacgtacgtgatattgatataattgctaacattaaactgctaacgtctttgaaaaaaccaatatgtgtttcaatttccagaaaatcgtttataggatctttatttggtttagctgtggaagatagactgattccttcaattattgccgagatatatagcgtgatgaatggcgcctctctgatacggactcataatgtcaaagaaactagacaagcaatagaaatgttcgaaatgatccactagatatctgagttaatgtaacaattataactattagaatacaaatatcgtttgatttgatttgaataaaactcatgaaattgatcatattattcctggaaaatcgttagctataattgaggaatttgactcgggtaaaaacacctatttagatgagggtgaggttagatcttctgttattggaaaatctagcgctaatatgatcgatcgtatattaagtgtcaaacaaaaaaatccccctatgatacctaagattggtgatattgttgttggatatatcgatatgctatttggaaatatgatatcggtaaggatagtttatatcaatgaaaaatattccaaatctggtttttctgcgatagcttccactcgtatgtctaattcgggtggaaactatggttcaggctggcgtgagagaagttataaaggtaaatttgtttttaaggtaggtgatattataagaggaagagtatttagcttattaaattcttcaattcatttgacgttagaggacagagacttgggagttgtgtatacaatctgcttttcttgtggaaatgagtttgtcaaagtaccaggaggattgaaatgcaattcctgtggtaactttgaagacaggaaagtttcaattgactatggaaaagaatcctttacagttttatatgataaacaatttcccatgacatgaatgccttcaaggtaggttttcaaggagagtctggatcctacagtgaagcttctgcccgtattcaataccctgatccaagttattcattcattccatttagatcatttcgtgaattgtttgatggtgttgaaaattctgtcgtggatctggcagtagttcctattgaaaattctacagaaggaagtataaatgaaacttatgacttactagttgaaaaacctctttacgctatcggggaaatatatcaaaaaatacatcattgtttaatcatcgataagaattcgtctctagacgaaatttctgttgtctactctcatccacaggcgttagctcagtgtagaaagtatatccaaaagaaacacttagaatcaatccctatgtacgatactgcaggatctgttaaatttattaaagaaactcataatactagcgcagcggcgatagctagcaaacatgccgcccaaatctatgacatgaaggttgtagaagaagatatcgaggataattctaataattttaccagatttttaataatttccaaaagttatgatatgaaagccgatgacaataagatatcagttattttttctatccctcatgctcctggatcattatattctatactccaagagtttgcattaagaaacattaatttaacaagaattgaatcaagacctacgaaaaatataccttgggagtattatttttttgtagatttagagggaaacgttaatgatgataaaatttctgcctctcttttatctgtcaagtctgctactatattctttaagttattaggttcgtataagaaagacgaaatgaggtagttatgactgccttctggttctgattcctaatcctaatattacaacacctgttatgatcaacatcatttggccactaaacgcaagtggactggccttcgaaaatgcccctaaattcaaattcaatgtattttctccttcattaataacctgaattttgtacttaccatttacttctgatgtaacagtttcattcattacccccgtatttccagttttattcattatcaatttattgttggggtctatcattagtactgtagattcagatccattaacataaatatttgcgatgttacccgaattcatatctggagtgaatattccagattgatttggttttatcatctcagtaatttctacatacctagggatgttcgaatcaataattgaaacaatacctatcccaataaaaatgaatcctgcaataaaaaatattatcagggaaagcctttttgatataactaccataaatttgcttatgatagcagatgattaaatataatctttacaaattctactgcaacaattattcgggataataattattgtttgaaaaaccaaacaatgctgcttatgttattgtttatttttttattaaaccattgattaggagattgattggtaatctcaataaaatgtcactcatgcagaagaattgtattgtatatctaatatataccacaagtttaatatcaaatgattcggaattgtggtgttatccagacttatcctataaccaatgctgaattttgaaaaattcttcgatgggttctttctttaataactttatcaaagctaatccttgtggaactgatagtactggtttggaaaaataattatcagttcctaatcgtggacatgctacttgaataaaagcatcaatttctctaaagttttctaacttctcatttgaaatctcggtcaaagctataagttgtacattaattcctaatttacttagctctttcttaaattctaaagctttaatatttgcaaattgcccttcttttaatcctattattatccctaatgttcttgcatcgagtgccttgtacacagagagtattgctctcttcttgacaacttctgcttcgttattgatttgcaaaaattcctcaaaatatggatctagcataaatgttggtttttctgtggaaagggctatccctatcgaatggaatctactttgaccaagaaaaataaaagcatcaatttcacttttgatgttgtgtagtggatgaaattcacaaccaaagacttgtgcatcattcaattgtcctttgcctttcccttttaccacgacaaaaccgttatcctcaaaaatctttttgaccatgtcaagttgatgcaagtgctgactgtctgtaactaatgatatggtcttaaatcgcccctttaattccgttgcgcattttagtgcaacattatcaaaccctatggtatcaaaagcatttatcatgaatactttctctccaaaattttctatagttatagtatgccctacgttaaataatatgtctgcacccagcatctctgcagcatgtgtgttaagatcacaagaaccccagctcttatctcctagtatataagatattatgttgaattcaatttcaattttttcagaaactttttgaatttttggtaataggggttcaggaccattcagagctacggaacgaggttttctctctctaatgatatcaaaaattctatcttcatctatctggatcaaattaaacgcctttctgaatcgtattggactatacgttaatatttttatgtatttttatatctcatctctccattaccaaaaacaccaccagccgttcctttctcctatcaatattgaatatttgatctataatttctataatcctaaatcgttaatcaagagttaaatctacttatcataattgcagttcttgtctcggactaataatttggatactttgagaaaataactataatatagatgcaactgtaattgctgtcgcggataatgtgattagctttaagaatgatttgagcttggaaaatgacaattatttctcatcttccattttctcttcaggatttactcctcaaatagtttagaggtttataaaatattttgttgcaggttaatcatgtgacggctacctaggatacaatcgataccgcattagctattgcattgtttatggacgttatcgattttgaggaggcaatggtgataagatccttactgagcaatggaaatttggaatattagttaagaggtcaaatgatgtatctaataagagaataaaaacaaatatcatgcaaaaacataatatgtattacaatatttataaaaataaataaaaaattaagtagaggtcctatttagttgttggcttagatcatattgtgaaatatagggttcggggaatcctattctatcttcaggacatccaaaacctccttgcagtgcctttcttaccacattttcggaaatatcgactgtagagttatcagaagatgcaggttctcctcctgctggttgacatgagaacgttacatcaaagttcgttccattgatgtttccataaattctatagtcaaatgttgttgcaactgttggataaaatgtctctgattcatattttcctacttcaccaaatgcaggatccaaattagatgtcatgttcttgtcaccggctaatatttccacctttaacatgttttctagtccagtaattggttgggtcccgtttgctctactattggttggatctgaagcatttggccagtatccatcaagtgtagctgcagttttatcatctacatataatggttcatttgcagaaccaataacaaacaagtaatctttcccgtttatgttaaaaagggctctttggtgagcatatgacatttgcaacacaggagctgctaacatcgagactgctattacagctcccaaaagaatcagatgatttttattcataaagagtttatgtctaaagtttattataacaattgttgtacaatcttcgaacgtatagattaactccaatttctgatgcaaaatgtataatcacgatcttatgtctaatgaaaactcataattcagctattgattttgaaaccatatgcgttagcgacttcgacatttgtacaataatcatattatatcttaattgtaaatatagtttatgaatttttcagcaattttgtttgttgctgtggtttctatagtaggaactggtatatcgattttgacaactgtatcattattacccgtattcggtcacgcaagtcctgtaacttatttgcctgaacccaatgaaataatcaattctccaaaatcagtacctgaccaagtaactatcgcatttacagaaaatccagagccaagagcaagtagtatcaaaataatgaattctaataatgaaagaatcgataacaacgatttaagggcatctgattcaaataagtcactttctgttactttagactcatctaaagttatcccgggcgtttacaccgtcaattggcttgtattgtctaaagacgacgggcatattacaaaaggctcatatgtcttttcagttaaagataacaacagtagaacccaacaaccatcagataatatatcaaatatatcacccgattattctactaatgttacaaccactgacaatgtagttctaaattttaatattgctccttttaaagtgggttcaaatacctttgatcttcacatctatcatgtaaatggtaccgcggttgaaaatattaggaatgtgtttttagaattcaataatcctgataagaacttggggccactggttgatactatgaagaaagtaggagtgggaaattattcctctactggaaattatcttagtcaagaagggaaatggaatataaaaataaccgttcaaagaattggtgaatacgacatcaaccagcgaatcaacgttgatgtccaataatcaatttctaaggattctgagaagtggatatcgttcagcatacaaccaaataatgttcaaaccaagagcatcttgttaaatgacacgttttttaacaaaccaatcctattattcagtgatatttttaatttcggatcaagaaattggatagatcgtagtaaaagatggggcataacttgaaatatttcttacccaatatctcttcctgattaaaattattcataacctaaggttaatattatactgaataaaaatctattttgacttgtactatgcaagtcgcacaggagttagaatgtgaatggaaaaattagtaactataacaaagtaactacttttcgatgaaacaactaatcgatgtcattaaactagttaacatgaaaatgatgagggagattcgatca
